(19) United States
(12) Patent Application Publication
(10) Pub. No.: US 2023/0220048 A1
(43) Pub. Date: Jul. 13, 2023

(54) THERAPEUTIC FUSION PROTEINS

(71) Applicant: NOVARTIS AG, Basel (CH)

(72) Inventors: Sebastien IRIGARAY, Zimmersheim (FR); Laurent KLEIN, Zaessingue (FR); Darko SKEGRO, Riehen (CH); Marco VILLANI, Saint-Louis (FR); Karl WELZENBACH, Huningue (FR)

(21) Appl. No.: 17/640,295

(22) PCT Filed: Sep. 4, 2020
(86) PCT No.: PCT/IB2020/058252

§ 371 Date: Mar. 3, 2022

(30) Foreign Application Priority Data
Sep. 6, 2019 (EP) 19196045.9

(51) Int. Cl. C07K 14/765; C07K 14/485; C07K 14/705

(52) U.S. Cl. CPC C07K 14/765; C07K 14/485; C07K 14/7056; C07K 2319/30; C07K 2319/31; A61K 38/00

(57) ABSTRACT

The present invention relates to fusion proteins suitable for use as a medicament or research tool. Therapeutic uses of the fusion proteins may include the prevention or treatment of acute or chronic inflammatory and immune system-driven organ and micro-vascular disorders, for example, acute kidney injury, acute myocardial infarction, acute respiratory distress or chronic obstructive pulmonary disease fibrosis and other organ injuries resulting from tissue trauma and acute and chronic injury.

### SEQUENCE LISTING

[0001] The instant application contains a Sequence Listing which has been submitted electronically in ASCII format and is hereby incorporated by reference in its entirety. Said ASCII copy, created on Aug. 31, 2020, is named PAT058332_SL.txt and is 653,193 bytes in size.

### FIELD OF THE INVENTION

[0002] The present invention relates to multidomain fusion proteins comprising albumin inserted within the domains of the protein, e.g. multidomain fusion proteins comprising albumin inserted within the domains of the protein and further comprising both integrin binding and phosphatidylserine binding capabilities. The fusion proteins can be used as therapeutics, in particular for the prevention or treatment of acute or chronic inflammatory disorders and immune system- or coagulation-driven organ and micro-vascular disorders.

### BACKGROUND

[0003] Most proteins comprise more than one domain (domains are defined as independent evolutionary units that can either form a single-domain protein on their own or recombine with others to form part of a multidomain protein). A wide variety of biologically active proteins can now be produced for use as drugs. However, such proteins that have desired therapeutic properties may not have sufficiently high solubility, stability and other desirable manufacturing properties.

[0004] HSA is well known as a transporter molecule for many essential endogenous compounds, including nutrient, hormones and waste products in the bloodstream. It also binds to a wide range of drug molecules. HSA has been used in five different drug delivery technologies; (1) genetic fusion to the N- or C-terminal end, (2) chemical coupling of low-molecular weight drugs, (3) association of drugs with hydrophobic pockets of albumin, (4) association of albumin-binding domains (ABDs) that are genetically fused to drugs, and (5) encapsulation of drugs into albumin nanoparticles (Elsadek B, Kratz F. Impact of albumin on drug delivery—new applications on the horizon, J Control Release (2012) 157(1):4-28. doi:10.1016/j.jconrel.2011.09.069; Kratz F. A clinical update of using albumin as a drug vehicle—a commentary. J Control Release (2014) 190:331-6. doi:10.1016/j.jconrel.2014.03.013).

[0005] Two human serum albumin (HSA) fused drugs have been approved for clinical use; Tanzeum® and Idelvion®, which contain glucagon-like peptide 1 and recombinant coagulation factor IX, respectively. Both drugs are genetically fused to the N-terminal of HSA, which prolongs the half-life from 2 min to 5 days for the peptide and from 22 h to 102 h for the coagulation factor.

[0006] Many other protein drugs are linked to polyethylene glycol (PEG), reCODE PEG, antibody scaffold, polysialic acid (PSA), hydroxyethyl starch (HES), and serum proteins, such as albumin, IgG and FcRn, to extend their plasma half-lives and to achieve enhanced therapeutic effects (Kim et al., (2010) J Pharmacol Exp Ther., 334: 682-92; Weimer et al., (2008) Thromb Haemost. 99: 659-67; Dumont et al., (2006) BioDrugs, 20: 151-60; Schellenberger et al., (2009) Nat Biotechnol., 27: 1186-90).

[0007] Acute inflammatory organ injuries (AOIs) are historically challenging diseases with high morbidity, mortality and significant unmet medical need. Typical AOIs include myocardial infarction (MI) and stroke which occur in 32.4 million patients worldwide every year. Patients with previous MI and stroke are considered by the World Health Organization as the highest risk group for further coronary and cerebral events, which rank amongst the top causes of morbidity in the developed world. Another AOI is acute kidney injury (AKI), which occurs in about 13.3 million people per year. In high income countries, AKI incidence is 3-5/1000 and is associated with high mortality (14-46%) (Metha et al., (2015) Lancet, 385(9987): 2616-43). Similar to MI and stroke, AKI survivors often fail to recover completely and are at increased risk of developing chronic kidney disease or end-stage renal disease. There is to date no FDA-approved drug available to prevent or treat AKI. Developing new treatments for AKI has proven challenging, with no successful outcomes from clinical trials so far. This is likely due to the multifactorial and multifaceted pathophysiology of AKI including inflammatory, microvascular dysfunction and nephrotoxic pathomechanisms elicited by septic, ischemic/reperfusion and/or nephrotoxic insults. These drivers can act simultaneously or consecutively to cause mostly tubular but also glomerular cell damage, loss of renal functional reserve and eventually kidney failure.

[0008] One common denominator of AOIs is increased cell death due to tissue injury, increased generation of cell fragments and prothrombotic/proinflammatory microparticles which can enter the circulation and injured tissue. After tissue infiltration of neutrophils to defend against infection, neutrophils undergo apoptosis or other forms of cell death in the affected tissue. Neutrophils contain harmful substances, including proteolytic enzymes and danger-associated molecular patterns (DAMPs) that can promote host tissue damage and propagate inflammation. Efficient uptake of dying cells triggers signaling events that lead to the reprogramming of macrophages (Mϕ) towards a non-inflammatory, pro-resolving phenotype and the release of key mediators for successful resolution and repair of the affected tissue. This reprograming has been recently attributed to a metabolic signaling which activates phagocytic anti-inflammatory responses in macrophages (Zhang et al., (2019) Cell Metabolism, 29(2): 443-56). This removal of debris, or aged or dying cells in a non-inflammatory manner is termed ‘efferocytosis’.

[0009] However, in the case where efferocytosis is delayed, necrotic cells can accumulate and cause, for example, inflammatory responses triggering of pro-inflammatory cytokines (TNF-α) or immunosuppressive IL-10 by macrophages (Greenlee-Wacker (2016) Immunol. Reviews, 273: 357-370). Furthermore, if cell debris and particulates are not removed efficiently, they can cause cell clumps and aggregates, such as neutrophil-platelet fragment clusters, micro-thrombi and/or release danger-associated molecular patterns (DAMPS) such as ATP, DNA, histones or HMGB1. The consequences can include microvasculature occlusion, dysfunction and pronounced sterile inflammation resulting in progression of tissue injury, primary and secondary organ failure or maladaptive repair.

[0010] In the acute phase of AOIs, efferocytotic pathways appear significantly downregulated. Inflammation or acute response to injury (mechanical cues, hypoxia, oxidative stress, radiation, inflammation, and infection) suppress effective efferocytosis or phagocytosis by downregulation of dedicated phosphatidylserine (PS) binding proteins which include bridging proteins and cell surface efferocytosis/clearance receptors. An example for defunctionalization of an efferocytosis receptor is the proteolytic shedding of TAM family receptors such as Mer tyrosine kinase (MerTK). MerTK is an integral membrane protein preferentially expressed on phagocytic cells, where it acts as signaling protein but also promotes efferocytosis (via proteins such as Gas6 or Protein S) and inhibits inflammatory signaling. Proteolytic cleavage and release of the soluble ectodomain of MerTK is induced by the metalloproteinase ADAM17. The shedding process can reduce efferocytosis of phagocytic cells by deprivation of surface MerTK. In addition, the released ectodomain can also inhibit efferocytosis in vitro (Zhang et al., (2015) J Mol Cell Cardiol., 87:171-9; Miller et al., (2017) Clin Cancer Res., 23(3):623-629). Increased serum/plasma soluble Mer amounts are typically observed in inflammatory, malignant or autoimmune diseases such as diabetic nephropathy or systemic lupus erythematosus (SLE) and can mark disease severity (Ochodnicky P (2017) Am J Pathol., 187(9):1971-1983; Wu et al., (2011) Arthritis Res Ther. 13:R88). In addition, bridging proteins such as milk fat globule-EGF factor 8 protein (MFG-E8) are also downregulated during the most acute and chronic inflammatory diseases. Similar to soluble Mer, reduced serum/plasma concentration of MFG-E8 can be found in patients with MI or stable angina patients (Dai et al., (2016) World J Cardiol., 8(1): 1-23) and can mark disease severity as described for chronic obstructive pulmonary disease (COPD; Zhang et al., (2015) supra).

[0011] Phosphatidylserine (PS) exposure on dying cells is an evolutionarily conserved anti-inflammatory and immunosuppressive signal to immune cells. A vast number of major mammalian pathogens utilize PS mediated uptake as part of virulent cellular infection (Birge et al., (2016) Cell Death Diff., 23(6): 962-78). Viruses for instance can bind to PS binding-receptors directly or via proteins such as Gas6 (Morizono & Chen (2014) J Virol., 88(8):4275-90). It is possible that inactivation of endogenous clearance pathways in response to injury presents an evolutionary developed response to reduce the efficiency of an infectious agent to enter and hijack cells after injury and thereby eluding the hosts immune response and defense. In consequence, down-modulation of clearance pathways would improve the efficacy of innate and adaptive immune effectors to fight infection. As a “friendly fire” consequence, efferocytosis can be temporarily impacted during acute organ injury and the above mentioned complications in AOIs may occur. An accumulation of dying cells, debris and proinflammatory and prothrombotic MPs are hallmarks of AOIs and represent major triggers of inflammation and microvascular damage. It is noteworthy, that such accumulation of proinflammatory and prothrombotic microparticles is common in severe diseases with high medical need and may contribute to their morbidity. Examples for such indications are sepsis and cancer (Yang et al., (2016) Tumour Biol., 37(6): 7881-91; Zhao et al., (2016) J Exp Clin Cancer Res., 35: 54; Muhsin-Sharafaldine et al., (2017) Biochim Biophys Acta Gen Subj., 1861(2): 286-295; Ma et al., (2017) Sci Rep., 7(1): 4978; Souza et al., (2015) Kidney Int. 87(6): 1100-8). Previous drug discovery efforts in this area have focused on PS binding proteins, which can serve as basis for a drug candidate design as reviewed by (Li et al., (2013) Exp Opin Ther Targets, 17(11): 1275-1285).

[0012] A subset of PS binding proteins also recognize and bind to integrins, such as αvβ3 and αvβ5, which are expressed on many cell types including phagocytes. These proteins act to bridge the PS exposing apoptotic/dying cells to integrins, resulting in efferocytosis (also termed phagocytosis) by macrophages and non-professional phagocytes. Some bridging proteins are also downregulated during the most acute and chronic inflammatory diseases. Therapeutic uses for such bridging proteins or truncated versions thereof have been previously suggested (WO2006122327 (sepsis), WO2009064448 (organ injury after ischemia/reperfusion), WO2012149254 (cerebral ischemia) The Feinstein Institute for Medical Research; WO2015025959 (myocardial infarction) Kyushu University & Tokyo Medical University; WO20150175512 (bone resorption) University of Pennsylvania; WO2017018698 (tissue fibrosis) Korea University Research and Business Foundation and US20180334486 (tissue fibrosis) Nexel Co., Ltd.); WO2020084344; however use of the wild-type or naturally occurring proteins is limited by a number of problems. For example, the wild-type MFG-E8 (wtMFG-E8) is considered to have poor developability, low solubility and to express at a very low yield when cultured in cell expression systems. Work by Castellanos et al., (2016) has shown that MFG-E8 expressed in insect or CHO cells as Fc-IgG fusion is completely aggregated and could only be purified efficiently by the addition of detergents such as Triton X-100 or CHAPS (Castellanos et al., (2016) Protein Exp. Pur., 124: 10-22).

[0013] Major functions of MFG-E8 reported so far are to enhance efferocytosis (Hanayama 2004 Science), to modulate lipid uptake/processing (Nat Med. 2014). rMFG-E8 regulates enterocyte-specific lipid storage by promoting enterocyte triglyceride hydrolase (TG) activity (JCI 2016). Intracellular MFG-E8 was shown as suppressor of hepatic lipid accumulation and inflammation acting through inhibition of the ASK1-JNK/p38 signaling cascade. (Zhang et al 2020). In addition, antiinflammatory properties, promotion of angiogenesis, atherosclerosis, tissue remodeling, and hemostasis regulation have been described for MFG-E8. Furthermore, MFG-E8 has been reported to remove excessive collagen in lung tissues, by binding of collagen through its C1 domain. Interestingly, MFG-E8−/− macrophages exhibited defective collagen uptake that could be rescued by recombinant MFG-E8 containing at least one discoidin domain (Atabai et al 2009)

[0014] In preclinical studies recombinant MFG-E8 has shown convincing protection in various, mostly rodent models of acute inflammatory and organ diseases as well in disease models with aberrant healing. Recombinant MFG-E8 has shown to accelerate wound healing of diabetic and I/R-induced wounds/ulcers (Uchiyama et al 2015/2017); accelerated repair of intestinal epithelium after colitis (Bu et al 2007) and acceleration of tendon repair after injury (Shi et al 2019); Recombinant MFG-E8 reduced kidney damage and fibrosis in ureteral obstruction (UUO) model (Brisette et al 2016). Besides, efficacy was attested in typical models of fibrosis where recombinant MFG-E8 accelerated resolution of TAA and CC14-induced liver fibrosis (An SY, Gastroenterology 2016) and protected in a bleomycin-induced lung fibrosis model (Atabai et al 2009). Recently, a C2 depleted truncated version was published to exert similar or even better efficacy in several preclinical fibrosis models including the TAA liver fibrosis model. (WO2020084344).

[0015] EDIL3 (EGF-like repeat and discoidin I-like domain-containing protein 3) was recently reviewed by Hajishengallis and Chavakis 2019. EDIL3 (alias DEL-1) was shown to mediate efferocytosis, regulate neutrophil recruitment and inflammation, can trigger as part of the hematopoietic stem cell niche emergency myelopoiesis (αvb3-integrin dependent), restrains osteoclastogenesis and inhibits inflammatory bone loss in rodents and non-human primates. EDIL3 was found as to be an integral component of the immune privilege of the central nervous system. The potential of EDIL3 as therapeutic protein was tested as an fusion protein with the Fc fragment of human IgG (DEL-1-Fc). DEL-Fc administration inhibited neutrophil infiltration, blocked IL-17 driven inflammatory bone loss in a mouse model of periodontitis (Eskan et al 2012 doi:10.1038/ni.2260). In addition, DEL-1-Fc improved periodontal inflammation, tissue destruction and bone loss in a non human primate periodontitis model (Shin et al 2015 DOI: 10.1126/scitranslmed.aac5380). Besides, DEL-1-Fc ameliorated relapsing-remitting experimental autoimmune encephalomyelitis (EAE), a translational multiple sclerosis model (Choi et al 2014 doi:10.1038/mp.2014.146); DEL-1-Fc furthermore decreased the incidence and severity of postoperative peritoneal adhesions in a mouse model Fu et al 2018.

[0016] The removal of dying cells, debris and microparticles by the bridging proteins, for example, MFG-E8, EDIL3, Gas6, could eliminate major causes of sterile inflammation and microvascular dysfunction and thus prevent progression of tissue injury and enable the resolution of inflammation. Therefore, a therapeutic approach to promote the clearance of dying cells during the course of AOIs could be used to reduce or at least alleviate the pathology of AOIs and could be meaningful in other disease settings where dying cells or PS exposing microparticles are insufficiently cleared.

[0017] As such, there is a need for a therapeutic multidomain proteins which have desirable manufacturing properties to address the unmet medical need.

### SUMMARY OF THE DISCLOSURE

[0018] In the present disclosure, the applicants have generated recombinant, therapeutic multidomain fusion proteins based on the structure of the naturally occurring proteins (e.g. MFG-E8) without the aforementioned undesirable properties and production issues of the wild-type protein. Specifically, albumin, e.g. human serum albumin (HSA), was identified as a highly effective solubilizing domain when located between the domains of a therapeutic multidomain fusion protein.

[0019] Provided herein are multidomain therapeutic fusion proteins comprising a solubilizing domain, wherein the solubilizing domain, e.g. albumin, such as HSA, is located between the domains of the fusion proteins, e.g. is located between the integrin binding domain and the PS binding domain.

[0020] The multidomain fusion proteins of the present disclosure comprise an integrin binding domain (for example EGF-like domain), a solubilizing domain and a phosphatidylserine binding domain (for example C1 domain from MFG-E-8 or its paralogue EDIL3). The proteins of the invention are suitable for prevention or treatment of acute or chronic inflammatory, immune system- or fibrosis-driven organ disorders. The proteins of the invention may also find its application to enable, accelerate and promote repair and regeneration.

[0021] Provided herein are therapeutic fusion proteins for enhancing efferocytosis comprising an integrin binding domain, a phosphatidylserine (PS) binding domain and a solubilizing domain, wherein the solubilizing domain is located between the binding domains of the fusion proteins, e.g. is located between the integrin binding domain and the PS binding domain.

[0022] The invention further provides methods for the development of a therapeutic multidomain protein by engineering one or more domains of the multidomain protein to have the desired therapeutic characteristics and inserting albumin, e.g. HSA or functional variants thereof, within the domains of the therapeutic protein.

[0023] The invention further provides methods of manufacturing of a therapeutic multidomain protein by engineering one or more domains of the multidomain protein to have the desired therapeutic characteristics and inserting albumin, e.g. HSA or functional variants thereof, within the domains of the therapeutic protein.

[0024] The fusion multidomain proteins maintain the major biologic functions of the wild-type protein, e.g. MFG-E8 or EDIL3 protein, for example, by functioning to bridge PS-exposing dying cells, debris and microparticles to phagocytes and therefore triggering efferocytosis. In addition, the therapeutic multidomain fusion proteins of the present disclosure have improved developability, in particular reduced stickiness and improved solubility compared to the wild-type, e.g. MFG-E8 protein (SEQ ID NO: 1), or to recombinant MFG-E8 and 02-truncated MFG-E8 (EGF_C1). Furthermore, these therapeutic multidomain fusion proteins have a longer plasma exposure and have a higher yield when expressed in cell expression systems when compared to the wild-type protein. The therapeutic fusion proteins according to the invention have increased macrophage-selective activity (enhancement of efferocytosis). In addition, the fusion proteins accordingly to the invention surprisingly do not impact on hemostasis/blood clotting, in comparison to full length MFG-E8 or full length EDIL3. Moreover, the therapeutic fusion proteins according to the invention have improved safety compared to full length, wild-type MFG-E8 or other full length functional variants.

[0025] Provided herein are therapeutic fusion proteins for enhancing efferocytosis comprising an integrin binding domain, a phosphatidylserine (PS) binding domain and a solubilizing domain, wherein the PS binding domain is a truncated variant of at least one PS binding domain listed in Table 2.

[0026] In some specific embodiments, the therapeutic fusion protein comprises the C-terminus of an integrin binding domain linked to the N-terminus of a solubilizing domain, and the C-terminus of the solubilizing domain linked to a PS binding domain. In some embodiments, the therapeutic fusion protein comprises the general structure EGF-S-C wherein EGF represents the integrin binding domain, e.g. EGF-like domain of MFG-E8, of EDIL3 or of any other protein comprising an integrin binding domain as listed in Table 1; S represents a solubilizing domain; and C represents a truncated PS binding domain, e.g. a truncated variant of the PS binding domain found in MFG-E8, EDIL3 or in any other protein comprising any of C1 and/or C2 of a PS binding domain as listed in Table 2. Examples of proteins comprising both an integrin binding domain and a PS binding domain, for example, MFG-E8 (SEQ ID NO: 1) and EDIL3 (SEQ ID NO: 11), are listed in Table 3.

[0027] In some embodiments, the PS binding domain comprises one of the two discoidin C1-C2 sub-domains, or a functional variant thereof. For example, the PS binding domain of human MFG-E8 having an amino acid sequence as set forth in SEQ ID NO: 3 or an amino acid of at least 90%, 95%, 96%, 97%, 98% or 99% sequence identity thereto, or truncated variants thereof. In one embodiment, the truncated PS binding domain comprises a truncated PS binding domain of human MFG-E8 or a functional variant thereof comprising one, two, three, four, five, up to 10 amino acid modifications. In one embodiment, the PS binding domain comprises a truncated PS binding domain of human EDIL3 or a functional variant thereof comprising one, two, three, four, five, up to 10 amino acid modifications.

[0028] In certain aspects, provided herein is a fusion protein comprising an epidermal growth factor (EGF)-like domain, a solubilizing domain, a C1 domain, but lacking a functional C2 domain. In some embodiments, the fusion protein comprises an epidermal growth factor (EGF)-like domain, a solubilizing domain, a C1 domain, but lacking a medin polypeptide or a fragment thereof.

[0029] In some embodiments, the solubilizing domain of the fusion protein is linked to the integrin binding domain. In some embodiments, the solubilizing domain is linked to the PS binding domain. In some embodiments, the solubilizing domain is linked to both the integrin binding domain and the PS binding domain, i.e. is located between the integrin binding domain and the PS binding domain. In some embodiments, the solubilizing domain is inserted within the integrin binding domain or is inserted within the PS binding domain. In one embodiment, the therapeutic fusion protein has the structure from N- to C-terminal: integrin binding domain-solubilizing domain-PS binding domain.

[0030] In some embodiments, the integrin binding domain of the therapeutic fusion protein comprises an Arginine-Glycine-Aspartic acid (RGD) binding motif and binds to αvβ3 and/or αvβ5 or α8β1 integrin(s).

[0031] In some embodiments, the solubilizing domain of the therapeutic fusion protein is linked directly to the integrin binding domain and/or linked to the PS binding domain i.e. is inserted between said domains. In an alternative embodiment, the solubilizing domain is linked indirectly to the integrin binding domain and/or the PS binding domain by a linker, such as an external linker. In some embodiments, the solubilizing domain comprises human serum albumin (HSA), domain 3 of HSA (HSA D3) or the Fc region of an IgG (Fc-IgG), or a functional variant thereof.

[0032] In some embodiments, the integrin binding domain is an EGF-like domain, for example, having an amino acid sequence as set forth in SEQ ID NO: 2 or an amino acid of at least 90%, 95%, 96%, 97%, 98% or 99% sequence identity thereto, or truncated variants thereof. In one embodiment, the EGF-like domain comprises the EGF-like domain of human MFG-E8 or a functional variant thereof comprising one, two, three, four, five, up to 10 amino acid modifications. In one embodiment, the EGF-like domain comprises the EGF-like domain of human EDIL3 or a functional variant thereof comprising one, two, three, four, five, up to 10 amino acid modifications.

[0033] In some embodiments, the solubilizing domain is HSA or a functional variant thereof, for example, having an amino acid sequence as set forth in SEQ ID NO: 4 or an amino acid of at least 90%, 95%, 96%, 97%, 98% or 99% sequence identity thereto, or truncated variants thereof. In one embodiment the HSA comprises the amino acid substitution C34S that functions to lower the propensity of the protein to aggregation, and has the amino acid sequence as set forth in SEQ ID NO: 5. In some embodiments, the solubilizing domain comprises human serum albumin (HSA) or a functional variant thereof comprising one, two, three, four, five, up to 10 amino acid modifications, for example, HSA C34S, or a truncated variant of HSA, for example, domain 3 of HSA (HSA D3) or a functional variant thereof. In a preferred embodiment, the solubilizing domain is HSA C34S.

[0034] In an alternative embodiment, the solubilizing domain comprises the Fc region of an IgG (Fc-IgG), for example the Fc region of a human IgG1, IgG2, IgG3 or IgG4 or a functional variant thereof. In one embodiment the solubilizing domain comprises the Fc region of a human Fc-IgG1 having an amino acid sequence as set forth in SEQ ID NO: 7 or an amino acid of at least 90%, 95%, 96%, 97%, 98% or 99% sequence identity thereto, or truncated variants thereof. In one embodiment, the Fc-IgG1 comprises the amino acid substitutions D265A and P329A to reduce Fc effector function, and has the amino acid sequence as set forth in SEQ ID NO: 8. In another embodiment, the Fc-IgG1 comprises the amino acid substitution T366W to create a ‘knob’ or it may comprise the amino acid substitutions T366S, L368A, Y407V to create a ‘hole’. In addition, the Fc-IgG1 knob may comprise the amino acid substitution S354C and the Fc-IgG1 hole may comprise the amino acid substitution Y349C, so that on pairing a cysteine bridge is formed. In addition to the knob in hole modifications, the Fc-IgG1 may also comprise the D265A and P329A substitutions to reduce Fc effector function. In one embodiment, the Fc-IgG1 has the amino acid sequence as set forth in SEQ ID NO: 9 or 10.

[0035] In a preferred embodiment, the therapeutic fusion protein comprises milk fat globule-EGF factor 8 protein (MFG-E8) and a solubilizing domain, wherein MFG-E8 comprises an integrin binding EGF-like domain (SEQ ID NO: 2) and a functional variant of the phosphatidylserine binding C1-02 domains (SEQ ID NO: 3, or SEQ ID NO: 76). The MFG-E8 may comprise naturally occurring or wild-type human MFG-E8 (SEQ ID NO: 1), or MFGE-8 with SEQ ID NO: 75 or a functional variant thereof. In one embodiment, the solubilizing domain is linked to the N or C-terminal of MFG-E8. In one embodiment, the solubilizing domain is inserted between the EGF-like domain and C1 domain or between the EGF-like domain and the C2 domain. In a preferred embodiment, the solubilizing domain is linked to the C-terminus of the EGF-like domain and linked to the N-terminus of the C1 domain. The solubilizing domain may be linked directly or indirectly to the C-terminal of the EGF-like domain and linked directly or indirectly to the N-terminus of the C1 domain. In some embodiments, the indirect linkage is by means of an external linker, for example a glycine-serine based linker.

[0036] In some embodiments, and as described in the Examples section, the therapeutic fusion proteins of the present disclosure function to promote efferocytosis by endothelial cells in a human endothelial cell-Jurkat cell efferocytosis assay and restore impaired and boost basal efferocytosis by macrophages in a human macrophage-neutrophil efferocytosis assay; the fusion proteins function to reduce numbers of plasma microparticles by clearance in a human endothelial-microparticle efferocytosis assay; and/or the fusion proteins provide protection against multi-organ injury in an acute kidney ischaemia model.

[0037] Also disclosed herein are methods, uses, diagnostic reagents, pharmaceutical compositions and kits utilizing or comprising these therapeutic fusion proteins. Also provided herein are nucleic acids encoding the disclosed fusion proteins, cloning and expression vectors comprising such nucleic acids, host cells comprising such nucleic acids, and processes of producing the disclosed fusion proteins by culturing such host cells.

### BRIEF DESCRIPTION OF THE FIGURES

[0038] FIG. 1 shows a schematic representation of examples of therapeutic fusion proteins of the present disclosure. A solubilizing domain (labelled ‘SD’) was linked at either the C-terminus, the N-terminus, or between the EGF, C1 or C2 domains of MFG-E8.

[0039] FIG. 2 shows a number of SDS-PAGE protein gels of the fusion proteins expressed in HEK cells. FIG. 2A: EGF-HSA-C1-C2 protein (FP330; SEQ ID NO: 42); FIG. 2B: EGF-HSA-C1-C2 of EDIL3 protein (FP050; SEQ ID NO: 12); FIG. 2C: EGF-Fc(KiH) C1-C2 protein non-reduced and reduced (this protein is a heterodimer of FP071 (EGF-Fc(knob)-C1-C2; SEQ ID NO: 18) with Fc-IgG1 hole (SEQ ID NO: 10)); FIG. 2D: EGF-HSA-C1 protein (FP260; SEQ ID NO: 34). For each of FIGS. 2A, 2C and 2D, the first column shows a Precision Plus protein unstained standards marker and the second column shows the respective fusion protein. For FIG. 2B, the first column shows the fusion protein and the second column shows a Precision Plus protein unstained standards marker. FIG. 2E shows further recombinant proteins which have been produced and purified.

[0040] FIG. 3 exemplifies the effect of loss of wild type (wt) MFG-E8 versus the fusion protein FP278 (EGF-HSA-C1-C2-His tag; SEQ ID NO: 44) protein during practical handling. FIG. 3A shows a loss of efficacy for wtMFG-E8 in the L-α-phosphatidylserine competition assay when protein dilutions were made in polypropylene plates (symbol: □) in comparison to dilutions made in non-binding plates (symbol: ●). In contrast, FIG. 3B shows virtually no loss of efficacy for the fusion protein FP278 (EGF-HSA-C1-C2-His tag; SEQ ID NO: 44) in the PS competition assay when protein dilutions were made in polypropylene plates (symbol: □) versus non-binding plates (symbol: ●).

[0041] FIG. 4 shows binding of fusion proteins to L-α-phosphatidylserine. FIG. 4A shows binding of FP278 (EGF-HSA-C1-C2-His tag; SEQ ID NO: 44) to immobilized L-α-phosphatidylserine and to a weaker extent to the phospholipid cardiolipin, in a concentration dependent manner. FIG. 4B shows binding of human wtMFG-E8 and a number of therapeutic fusion proteins: FP278 (EGF-HSA-C1-C2-His tag; SEQ ID NO: 44), FP250 (EGF-HSA; SEQ ID NO: 32), FP260 (EGF-HSA-C1; SEQ ID NO: 34), and FP270 (EGF-HSA-C2; SEQ ID NO: 36), to immobilized L-α-phosphatidylserine in a concentration dependent manner in a competition assay format (competition against binding of biotinylated mouse wtMFG-E8 to L-α-phosphatidylserine).

[0042] FIG. 5 shows αv-integrin-dependent cell adhesion to fusion proteins. FIG. 5A shows that cell adhesion to FP330 (EGF-HSA-C1-C2; SEQ ID NO: 42) is completely blocked by the αv integrin inhibitor cilengitide or 10 mM EDTA. A single point mutation in the integrin binding motif RGD (RGD>RGE) of the EGF-like domain (FP280; SEQ ID NO: 38) results in complete abrogation of cell adhesion as shown in FIG. 5B. FIG. 5C shows that immobilized EGF-HSA protein (FP250; SEQ ID NO: 32) does not or only moderately supports adhesion of BW5147.G.1.4 cells despite an EGF-like domain. As shown in FIG. 5D, a fusion protein of this disclosure (FP330; SEQ ID NO: 42) promotes αv-integrin-dependent cell adhesion similar to wtMFG-E8 when expressed in CHO cells or in HEK cells.

[0043] FIG. 6 shows the effect of the therapeutic fusion protein FP278 (EGF-HSA-C1-C2-His tag; SEQ ID NO: 44) on the promotion of efferocytosis of dying neutrophils by human macrophages. Concentration of the fusion protein is shown on the x-axis and efferocytosis [%] is shown on the y-axis.

[0044] FIG. 7 shows that the therapeutic fusion protein FP278 (EGF-HSA-C1-C2-His tag; SEQ ID NO: 44) can rescue endotoxin (lipopolysaccharide)-impaired efferocytosis of dying neutrophils by human macrophages. FIG. 7A shows the impairment of macrophage efferocytosis of dying human neutrophils by 100 pg/ml lipopolysaccharide (LPS) in three human donors. The left panel shows the individual donor response, the right panel shows the mean impairment of efferocytosis (%) of the three donors. FIG. 7B shows the rescue of this endotoxin (LPS)-impaired efferocytosis of dying neutrophils by human macrophages in the presence of the therapeutic fusion protein FP278. Efferocytosis indices of 3 different human macrophage donors were normalized and plotted as efferocytosis (%).

[0045] FIG. 8 shows the rescue of S. aureus particle induced impairment of efferocytosis of dying neutrophils by human macrophages with the therapeutic fusion protein FP278 (EGF-HSA-C1-C2-His tag; SEQ ID NO: 44). FIG. 8A shows the effect of a concentration of 100 nM of FP278 on promoting efferocytosis over the base level (dotted line; left-hand part of figure) as well as the effect of 100 nM FP278 in rescuing the impairment of efferocytosis caused by the administration of S. aureus (right-hand part of figure). FIG. 8B shows the effect of increasing concentrations of fusion protein FP278 (EC₅₀ 8 nM) on the rescue of impaired efferocytosis caused by the administration of S. aureus, and on the promotion of efferocytosis once the base levels of efferocytosis had been reached.

[0046] FIG. 9 shows the effect of the therapeutic fusion protein FP278 (EGF-HSA-C1-C2-His tag; SEQ ID NO: 44) on the promotion of efferocytosis of dying Jurkat cells by human endothelial cells (HUVEC). Efficiency of the fusion protein in the endothelial cell efferocytosis assay depends on the presence of a C1-C2 or C1-C1 tandem domain since, as illustrated in FIG. 9, a fusion protein of structure EGF-HSA-C2 (FP270; SEQ ID NO: 36) is ineffective in this assay.

[0047] FIG. 10 shows that the location of a HSA domain in the therapeutic fusion protein, namely in the N-or C-terminal position (FP220 (HSA-EGF-C1-C2; SEQ ID NO: 30) or FP110 (EGF-C1-C2-HSA; SEQ ID NO: 28), respectively), confers efferocytosis blocking function to the MFG-E8 HSA fusion protein in the macrophage efferocytosis assay. Concentration of fusion protein is shown on the x-axis, efferocytosis [%] is shown on the y-axis.

[0048] FIG. 11 shows a comparison of the promotion of efferocytosis by various formats of therapeutic fusion proteins comprising a HSA or Fc moiety. Concentration of the fusion protein is shown on the x-axis (nM), efferocytosis [MFI] is shown on the y-axis. FIG. 11A shows a comparison of fusion proteins comprising HSA with the HSA positioned at the C-terminal or N-terminal or between the EGF-like and C1 domains; FP110 (EGF-C1-C2-HSA; SEQ ID NO: 28), FP220 (HSA-EGF-C1-C2; SEQ ID NO: 30) and FP278 (EGF-HSA-C1-C2-His tag; SEQ ID NO: 44), respectively. FIG. 11B shows a comparison of fusion proteins comprising a Fc moiety with the Fc positioned at the C-terminal (FP060 (EGF-C1-C2-Fc [S354C, T366W]; SEQ ID NO: 14) and FP080 (EGF-C1-C2-Fc; SEQ ID NO: 22)) or between the EGF-like and C1 domains (FP070 (EGF-Fc-C1-C2; SEQ ID NO: 16)) compared to wild-type MFG-EG (SEQ ID NO: 1). Two formats of Fc moiety are shown: wild-type Fc (FP080; SEQ ID NO: 22) and a Fc moiety with the modifications S354C and T366W (EU numbering; FP060; SEQ ID NO: 14). FIG. 11C shows a comparison of three batches of the fusion protein FP090 (Fc-EGF-C1-C2; SEQ ID NO: 24) comprising a Fc moiety positioned at the N-terminal, at three different concentrations (0.72, 7.2 and 72 nM), compared to wt-MFG-E8 control. FIG. 11D shows the promotion of efferocytosis by a fusion protein construct FP050 comprising a HSA inserted between the EGF-like domain and the C1-C2 domain of EDIL3 (EDIL3 based EGF-HSA-C1-C2; SEQ ID NO: 12). FIG. 11E shows further examples of fusion proteins of the disclosure, for example chimeric variants (FP114 or FP260; SEQ ID NO: 34, FP147 or FP1777; SEQ ID NO: 71, FP1149, FP1150, FP145; SEQ ID NO: 80, FP1145; SEQ ID NO: 103, FP146; SEQ ID NO: 82, FP1146) and combinations of the integrin binding domains of MFGE8 or EDIL3 and PS binding domains such as the IgSF V domain of TIM4 or the GLA domain of the bridging protein GAS6 (FP1147 and FP1148).

[0049] FIG. 12 shows the promotion of efferocytosis by HUVEC cells of the therapeutic fusion protein FP278 (EGF-HSA-C1-C2-His tag; SEQ ID NO: 44) tested at 3 different concentrations up to 30 nM. The promotion of efferocytosis was concentration-dependent with efferocytosis increasing as the concentration of the fusion protein FP278 increased.

[0050] FIG. 13 shows that the therapeutic fusion proteins FP330 (EGF-HSA-C1-C2; SEQ ID NO: 42; FIG. 13A), FP278 (EGF-HSA-C1-C2-His tag; SEQ ID NO: 44; FIG. 13B) and FP776 (EGF-HSA-C1-C2; SEQ ID NO: 48; FIG. 13C) can rescue endotoxin (lipopolysaccharide)-impaired efferocytosis of dying neutrophils by human macrophages. Concentration of fusion protein is shown on the x-axis, efferocytosis [%] is shown on the y-axis.

[0051] FIG. 14 shows the effect of the fusion proteins FP330 (EGF-HSA-C1-C2; SEQ ID NO: 42; FIG. 14A), FP278 (EGF-HSA-C1-C2-His tag; SEQ ID NO: 44; FIG. 14B) and FP776 (EGF-HSA-C1-C2; SEQ ID NO: 48; FIG. 14C) on the promotion of efferocytosis of dying Jurkat cells by human endothelial cells (HUVEC). Concentration of fusion protein is shown on the x-axis, efferocytosis [%] is shown on the y-axis.

[0052] FIG. 15 shows that a single dose of the therapeutic fusion proteins FP278 (EGF-HSA-C1-C2-His tag; SEQ ID NO: 44), FP330 (EGF-HSA-C1-C2; SEQ ID NO: 42) or FP776 (EGF-HSA-C1-C2; SEQ ID NO: 48) protects kidney function in a model of ischemia-reperfusion injury-induced acute kidney injury (AKI). FIG. 15A shows that a raise in serum creatinine (sCr) (mg/dL; y-axis) is reduced by intraperitoneal (i.p.) administration of 0.16 mg/kg or 0.5 mg/kg of FP278 (SEQ ID NO: 44) (x-axis). As shown in FIG. 15B, intravenous (i.v.) administration of 0.5 mg/kg or 1.5 mg/kg of the fusion protein FP330 (SEQ ID NO: 42) reduced serum creatinine levels significantly. FIG. 15C shows that i.v. administration of the fusion protein FP776 (SEQ ID NO: 48) reduced serum creatinine in a dose-dependent manner.

[0053] FIG. 16 shows that a single dose of the therapeutic fusion protein FP278 (EGF-HSA-C1-C2-His tag; SEQ ID NO: 44) of either 0.16 mg/kg or 0.5 mg/kg, reduced blood urea nitrogen (BUN) levels in a murine model of acute kidney injury.

[0054] FIG. 17 shows that a single dose of the therapeutic fusion protein FP278 (EGF-HSA-C1-C2-His tag; SEQ ID NO: 44) protects distant organs from acute phase response elicited by ischemia reperfusion-induced AKI, based on gene expression of markers of injury. FIG. 17A exemplifies such AKI-induced response of serum amyloid protein (SAA) in the murine heart and FIG. 17B exemplifies such AKI-induced response (SAA) in the murine lung, both of which were potently blocked after single i.p. injection of the MFG-E8-derived fusion protein FP278 at 0.16 mg/kg or 0.5 mg/kg/i.p.

[0055] FIG. 18 shows the uptake of superparamagnetic iron oxide (SPIO) contrast agent (Endorem®) by the liver over time. Endorem® was injected intravenously as a bolus for 1.2 s into animals with AKI (at 24 h post disease induction) or after Sham operation (animals post 24 h nephrectomy). Animals with AKI showed significantly reduced uptake of the contrast agent by the liver (target=Kupffer cells) compared to Sham animals. Treatment with the fusion protein FP776 (EGF-HSA-C1-C2; SEQ ID NO: 48) dosed prophylactically −30 min before AKI induction, or dosed therapeutically +5 h post ischemia reperfusion injury induction, protected from the loss of contrast agent accumulation in the liver of AKI mice.

[0056] FIG. 19 The therapeutic fusion proteins FP114, also named herein FP260, (EGF-HSA-C1 SEQ ID No: 34) was tested in the AKI model as described in the Examples at 1.5 mg/kg/i.v. For this study FP114 was administered 30 min hours before ischemia reperfusion injury onset. Serum markers and kidney weight were assessed 24 h post induction of disease. Reduced serum creatinine and BUN as well as normal kidney weight suggest protection from AKI in this model.

[0057] FIG. 20 The therapeutic fusion protein FP135, also named herein FP261, (EGF-HSA-C1 SEQ ID No: 73) was tested in the CCL4 fibrosis model at 0.8 mg/kg/i.p. Treatment started either after 4 weeks of fibrosis induction (with CCL4) (total of 11 doses) or after 5 weeks of fibrosis induction with CCL4 (total of 8 doses) with 3 weekly doses administered. The third group of animals was dosed after 6 weeks at stop of disease induction with CCL4 (total of 4 doses). In all groups, FP135 was dosed once daily during the last 3 days. Liver stiffness was assessed at day of baseline (at start of experiment) at cessation of CCL4 and 3 days after cessation of CCL4. The data suggest that in animals which were treated with FP135 (start at after week 4 and 5 of CCl4) significant accelerated resolution of liver stiffness induced by CCL4 was achieved.

[0058] FIG. 21. FIG. 21A The therapeutic fusion protein FP135 (EGF-HSA-C1 SEQ ID No: 73) was tested in the CCL4 fibrosis model at 0.8 mg/kg/i.p. Treatment started either after 4 weeks of fibrosis induction (with CCL4) (total of 11 doses) or after 5 weeks fibrosis induction with CCL4 (total of 8 doses) with 3 weekly doses administered or after 6 weeks at stop of disease induction with CCL4 (total of 4 doses). In all groups, FP135 was dosed once daily during the last 3 days. The reduction of serum ALT suggest that treatment with FP135 helped to accelerate the resolution of liver damage caused by CCL4 in the groups in which treatment was started after week 4 and 5 of CCl4.

[0059] FIG. 21B The therapeutic fusion protein FP135 (EGF-HSA-C1 SEQ ID No: 73) was tested in the CCL4 fibrosis model at 0.8 mg/kg/i.p. as described for FIG. 21A The collagen content in livers of sacrificed animals was quantified by hydroxyproline assay. The reduction observed in 8 and 11 times dosed animals suggest that treatment with FP135 helped to accelerate the resolution of liver fibrosis caused by CCL4

[0060] FIG. 21C The therapeutic fusion protein FP135 (EGF-HSA-C1 SEQ ID No: 73) was tested in the CCL4 fibrosis model at 0.8 mg/kg/i.p. as described for FIG. 21A. The collagen expression in livers of sacrificed animals was quantified by qPCR. The reduction observed in 8 and 11 times dosed animals suggest that treatment with FP135 helped to accelerate the resolution of liver fibrosis caused by CCL4.

[0061] FIG. 22 shows Integrin adhesion data for section of truncated proteins FP137, FP135 and FP147.

[0062] FIG. 23 shows dynamic light scattering (DLS) of C2-truncated MFG-E8 (EGF-C1; SEQ ID NO: 115) and HSA fusion (EGF-HSA-C1; SEQ ID NO: 73).

### DETAILED DESCRIPTION

[0063] Disclosed herein are therapeutic multidomain fusion proteins comprising a solubilizing domain, wherein the solubilizing domain, e.g. albumin, such as HSA, is located between the domains of the fusion proteins, e.g. is located between the integrin binding domain and the PS binding domain. Disclosed herein are also therapeutic multi-domain fusion proteins comprising an integrin binding domain, a PS binding domain and a solubilizing domain. Also disclosed herein are methods of treatment using the fusion proteins of the disclosure as well as assays, such as an efferocytosis assay, useful for the characterization of the fusion proteins. Human serum albumin has many desirable pharmaceutical properties. These include: a serum half-life of 19-20 days; solubility of about 300 mg/mL; good stability; ease of expression; no effector function; low immunogenicity; and natural circulating serum concentration of about 45 mg/mL. HSA is known in the art as versatile excipient for drug formulation to effectively stabilize, protect proteins, peptides, vaccines, cell and gene therapy products from surface adsorption, aggregation, oxidation, precipitation among other things. The crystal structure of HSA without and with ligands, including biologically important molecules such as fatty acids and drugs, or complexed with other proteins is well-known in the art. See, e.g., Universal Protein Resource Knowledgebase P02768; He et al., Nature, 358:209-215 (1992); Sugio et al., Protein Eng., 12:439-446 (1999). The amino acid sequence as well as the structures of bovine, horse, rabbit, equine and leporine albumins are known. See, e.g., Majorek et al., Mol. Immunol, 52: 174-182 (2012); Bujacz, Acta Crystallogr. D Biol. Crystallogr., 68: 1278-1289 (2012). Numerous natural? genetic variants of human serum albumin are well-known in the art. Such natural occurring variants can impact on stability, half-life, ligand binding and carrier function of HSA See, e.g., The Albumin Website maintained by the University of Aarhus, Denmark and the University of Pavia, Italy at albumin.org/genetic-variants-of-human-serum-albumin and albumin.org/genetic-variants-of-human-serum-albumin-reference-list. For that reason it is feasible to utilize human serum albumin and its natural genetic variants [or engineered versions of HSA] for generation of novel therapeutic drugs. Such albumin, e.g. HSA, variants are known, for example from WO2012150319, WO2014072481.

### Definitions

[0064] In order that the present disclosure may be more readily understood, certain terms are specifically defined throughout the detailed description. Unless defined otherwise, all technical and scientific terms used herein have the same meaning as commonly understood by those of ordinary skill in the art to which this disclosure pertains.

[0065] In all cases where the term ‘comprise’, ‘comprises’, ‘comprising’ or the like are used in reference to a sequence (e.g., an amino acid sequence), it shall be understood that said sequence may also be limited by the term ‘consist’, ‘consists’, ‘consisting’ or the like. As used herein, the phrase ‘consisting essentially of’ refers to the genera or species of active pharmaceutical agents included in a method or composition, as well as any excipients inactive for the intended purpose of the methods or compositions. In some aspects, the phrase ‘consisting essentially of’ expressly excludes the inclusion of one or more additional active agents other than a multi-specific binding molecule of the present disclosure. In some aspects, the phrase ‘consisting essentially of’ expressly excludes the inclusion of one or more additional active agents other than a multi-specific binding molecule of the present disclosure and a second co-administered agent.

[0066] The term ‘efferocytosis’ as used herein refers to a process in cell biology, wherein dying or dead cells, such as apoptotic or necrotic or aged cells or highly activated cells or extracellular cellular vesicles (microparticles) or cellullar debris—collectively called “prey”—are removed by phagocytosis, i.e. are engulfed by a phagocytic cell and digested. During efferocytosis, the phagocytic cells actively tether and engulf the prey, generating intracellular large fluid-filled vesicles containing the prey called an efferosome, resulting in a lysosomal compartment where degradation of prey is initiated. During apoptosis, efferocytosis ensures that the dying cells are removed before their membrane integrity is compromised and their contents could leak into the surrounding tissues preventing the exposure of the surrounding tissues to DAMPs such as toxic enzymes, oxidants and other intracellular components such as DNA, histones, and proteases. Professional phagocytic cells include cells of myeloid origin such as macrophages and dendritic cells but other, e.g. stromal cells, can also perform efferocytosis such as epithelial and endothelial cells and fibroblasts. Impaired efferocytosis has been linked to autoimmune diseases and tissue damage and has been demonstrated in diseases such as cystic fibrosis, bronchiectasis, COPD, asthma, idiopathic pulmonary fibrosis, rheumatoid arthritis, systemic lupus erythematosus, glomerulonephritis and atherosclerosis (Vandivier R W et al (2006) Chest, 129(6): 1673-82). No therapy that specifically promotes efferocytosis has entered clinics as of today.

[0067] The term ‘efferocytosis assay’ as used herein and as described in the Examples relates to an assay system developed for the profiling of fusion proteins, which utilizes human macrophages or human endothelial cells (HUVECs) as phagocytic cells. Exemplified herein are a macrophage-neutrophil efferocytosis assay, an endothelial cell-Jurkat cell efferocytosis assay or an endothelial-cell microparticle efferocytosis assay. These assays, as described in more detail in the Examples, can be used to demonstrate that MFG-E8-derived biotherapeutics such as the fusion proteins of the present disclosure, effectively promote efferocytosis of dying cells and microparticles by macrophages or endothelial cells. Furthermore, the described macrophage-neutrophil assay is suitable to demonstrate that such compounds of this invention can even rescue LPS or S. aureus impaired efferocytosis of dying cells.

[0068] The terms ‘polypeptide’ and ‘protein’ are used interchangeably herein to refer to a polymer of amino acid residues. The phrases also apply to amino acid polymers in which one or more amino acid residue is an artificial chemical mimetic of a corresponding naturally occurring amino acid, as well as to naturally occurring amino acid polymers and non-naturally occurring amino acid polymer. Unless otherwise indicated, a particular polypeptide sequence also implicitly encompasses conservatively modified variants thereof.

[0069] As used herein “domain(s)” refers to independent evolutionary unit(s) that can either form a single-domain protein on their own or recombine with others to form part of a multidomain protein.

[0070] The term ‘stickiness’ as used herein in relation to proteins of the present disclosure refers to a result of protein misfolding which promotes protein clumping or aggregation. These unwanted and nonfunctional effects are a result of surface hydrophobic interactions.

[0071] As used herein, ‘C-terminus’ refers to the carboxyl terminal amino acid of a polypeptide chain having a free carboxyl group (—COOH). As used herein, ‘N-terminus’ refers to the amino terminal amino acid of a polypeptide chain having a free amine group (—NH2).

[0072] As used herein, the term ‘fusion protein’ or “multidomain fusion protein” refers to a protein comprising a number of domains, which may not constitute an entire natural or wild-type protein but may be limited to an active domain of the entire protein responsible for binding to a corresponding receptor on the surface of a cell. The fusion proteins can be generated using recombinant protein design, where the term ‘recombinant protein’ refers to a protein that has been prepared, expressed, created, or isolated by recombinant DNA technology means. Tandem fusion, for example, refers to a technique whereby the proteins or protein domains of interest are simply connected end-to-end via fusion of N or C termini between the proteins. This provides a flexible bridge structure allowing enough space between fusion partners to ensure proper folding. However, the N or C terminus of the peptide are often crucial components in obtaining the desired folding pattern for the recombinant protein, with the effect that simple end-to-end conjoining of domains can be ineffective. Alternatively, the process of domain insertion involves the fusion of consecutive protein domains by encoding desired structures into a single polypeptide chain and sometimes the insertion of a domain within another domain. In both these afore mentioned processes the domains are ‘directly linked’ or ‘linked directly’. Domain insertion is often more difficult to carry out than tandem fusion due to the difficulty in finding an appropriate ligation site in the gene of interest.

[0073] In addition to the aforementioned fusion techniques of direct linkage, an external linker may be used to maintain the functionality of the protein domains in the fusion protein. Such a linker, refers to a stretch of amino acids that connects a protein domain to another protein domain and is referred to herein as an ‘indirect linker’. As such the domains are ‘indirectly linked’ or ‘linked indirectly’. For example, those of ordinary skill in the art appreciate that a polypeptide whose structure includes two or more functional or organizational domains often includes a stretch of amino acids between such domains that links them to one another. The linker permits domain interactions, reinforces stability and can reduce steric hindrance, which often makes them preferred for use in engineered protein design even when N and C termini can be fused. In some embodiments, a linker is characterized in that it tends not to adopt a rigid three-dimensional structure but rather provides flexibility to the polypeptide. Various types of naturally occurring linkers have been used in engineered proteins, for example, the immunoglobulin hinge region, which functions as a linker in many recombinant therapeutic proteins, particularly in engineered antibody constructs (Pack P et al., (1995) J. Mol. Biol., 246: 28-34). Besides natural linkers, a multitude of artificial linkers have been devised, which can be subdivided into three categories: flexible, rigid and in vivo cleavable linkers. (Yu K et al., (2015) Biotech. Advances, 33(1): 155-64; Chen X et al., (2013) Ad. Drug Delivery Reviews, 65(10): 1357-69). The most widely used flexible linker sequences are (Gly)n (Sabourin et al., (2007) Yeast, 24: 39-45) and (Gly₄Ser)n (SEQ ID NO: 64) (Huston et al., 1988, 85: 5879-83) where linker length can be adjusted by the copy number “n”. In some embodiments, a polypeptide comprising a linker element has an overall structure of the general form D1-linker-D2, wherein D1 and D2 may be the same or different and represent two domains associated with one another by the linker. In some embodiments, a polypeptide linker is at least 2, 3, 4, 5, 6, 7, 8, 9, 10, 11, 12, 13, 14, 15, 16, 17, 18, 19, 20, 21, 22, 23, 24, 25, 26, 27, 28, 29, 30, 35, 40, 45, 50, 55, 60, 65, 70, 75, 80, 85, 90, 95, 100 or more amino acids in length.

[0074] A ‘modification’ or ‘mutation’ of an amino acid residue/position, as used herein, refers to a change of a primary amino acid sequence as compared to a starting amino acid sequence, wherein the change results from a sequence alteration involving said amino acid residue/positions. For example, typical modifications include substitution of the residue (or at said position) with another amino acid (e.g., a conservative or non-conservative substitution), insertion of one or more amino acids adjacent to said residue/position, and deletion of said residue/position. An amino acid ‘substitution’ or variation thereof, refers to the replacement of an existing amino acid residue in a predetermined (starting) amino acid sequence with a different amino acid residue. Generally and preferably, the modification results in alteration in at least one physicobiochemical activity of the variant polypeptide compared to a polypeptide comprising the starting (or ‘wild-type’) amino acid sequence.

[0075] The term ‘conservatively modified variant’ applies to both amino acid and nucleic acid sequences. With respect to particular nucleic acid sequences, conservatively modified variants refers to those nucleic acids which encode identical or essentially identical amino acid sequences, or where the nucleic acid does not encode an amino acid sequence, to essentially identical sequences. Because of the degeneracy of the genetic code, a large number of functionally identical nucleic acids encode any given protein. For instance, the codons GCA, GCC, GCG and GCU all encode the amino acid alanine. Thus, at every position where an alanine is specified by a codon, the codon can be altered to any of the corresponding codons described without altering the encoded polypeptide. Such nucleic acid variations are ‘silent variations’, which are one species of conservatively modified variations. Every nucleic acid sequence herein that encodes a polypeptide also describes every possible silent variation of the nucleic acid. One of skill will recognize that each codon in a nucleic acid (except AUG, which is ordinarily the only codon for methionine, and TGG, which is ordinarily the only codon for tryptophan) can be modified to yield a functionally identical molecule. Accordingly, each silent variation of a nucleic acid that encodes a polypeptide is implicit in each described sequence.

[0076] For polypeptide sequences, ‘conservatively modified variants’ include individual substitutions, deletions or additions to a polypeptide sequence which result in the substitution of an amino acid with a chemically similar amino acid. Conservative substitution tables providing functionally similar amino acids are known in the art. Such conservatively modified variants are in addition to and do not exclude polymorphic variants, interspecies homologs, and alleles. The following eight groups contain amino acids that are conservative substitutions for one another: 1) Alanine (A), Glycine (G); 2) Aspartic acid (D), Glutamic acid (E); 3) Asparagine (N), Glutamine (Q); 4) Arginine (R), Lysine (K); 5) Isoleucine (I), Leucine (L), Methionine (M), Valine (V); 6) Phenylalanine (F), Tyrosine (Y), Tryptophan (W); 7) Serine (S), Threonine (T); and 8) Cysteine (C), Methionine (M) (see, e.g., Creighton, Proteins (1984)). In some embodiments, the phrase ‘conservative sequence modifications’ are used to refer to amino acid modifications that do not significantly affect or alter the binding characteristics of the binding domains of the engineered proteins of the present disclosure.

[0077] A ‘protein variant’ or ‘variant of a protein’ as referred to herein, relates to a protein comprising a variation in which one or more, for example, 2, 3, 4, 5, 6, 7, 8, 9, 10 amino acids have been modified. A ‘functional variant’ of a protein as referred to herein, relates to a protein variant comprising a modification that results in a change to the amino acid sequence but there is no change to the overall property of the protein or to its function. A ‘truncated variant’ of a protein, or of a domain of a protein, as referred to herein, relates to a shortened version of a protein, or of the protein domain, but the shortened version of the protein retains the function of the parent protein. To determine whether a functional variant or truncated variant has no change in the overall property or function, these variant proteins can be tested against a full length or unmodified parent protein for their effect in a number of assays as described in the present disclosure. For example, promoting efferocytosis by endothelial cells in a human endothelial cell-Jurkat cell efferocytosis assay, restoring impaired efferocytosis by macrophages in a human macrophage-neutrophil efferocytosis assay, reducing the number of plasma microparticles by clearance in a human endothelial-microparticle efferocytosis assay, and/or providing protection against multi-organ injury in an acute kidney ischaemia model.

[0078] The term “the therapeutic multidomain fusion protein maintains a major biologic function” as used herein refers to the biological activity of the multidomain protein, if it has at least 50% of the physicobiochemical activity as observed for the multidomain protein comprising the starting (or ‘wild-type’) amino acid sequence, without a solubilizing domain, e.g. without HSA inserted between the domains of the multidomain protein. The term “the therapeutic fusion protein maintains the major biologic function” as used herein refers to the biological activity of the multidomain protein, if it has at least 50%, at least 75%, more preferably at least 80%, such as at least 90%, at least 95%, at least 96%, at least 97%, at least 98% of the physicobiochemical activity as observed for the multidomain protein comprising the starting (or ‘wild-type’) amino acid sequence, or as observed for a multidomain protein comprising the staring (or ‘wild-type’) domain amino acid sequence, without a solubilizing domain inserted between the domains of the multidomain protein. The biological activity, e.g. physicobiochemical activity can be determined by methods well known in the art.

[0079] The terms ‘percentage identity’ or ‘percentage sequence identity’ in the context of two or more nucleic acids or polypeptide sequences, refers to two or more sequences or subsequences that are the same. Two sequences are ‘substantially identical’ and show ‘sequence identity’ if two sequences have a specified percentage of amino acid residues or nucleotides that are the same (i.e., at least 60% identity, optionally at least 65%, 70%, 75%, 80%, 85%, 90%, 95%, 96%, 97%, 98% or 99% identity over a specified region, or, when not specified, over the entire sequence), when compared and aligned for maximum correspondence over a comparison window, or designated region, e.g. as measured using one of the following sequence comparison algorithms or by manual alignment and visual inspection. Optionally, the identity exists over a region that is at least about 50 nucleotides (or 10 amino acids) in length, or over a region that is 100 to 500 or 1000, or 2000 or 3000 or more nucleotides in length, or alternatively, 30 to 200, or 300, or 500, or 700 or 800 or 900 or 1000 or more amino acids in length.

[0080] For sequence comparison, typically one sequence acts as a reference sequence, to which test sequences are compared. When using a sequence comparison algorithm, test and reference sequences are entered into a computer, subsequence coordinates are designated, if necessary, and sequence algorithm program parameters are designated. Default program parameters can be used, or alternative parameters can be designated. The sequence comparison algorithm then calculates the percent sequence identities for the test sequences relative to the reference sequence, based on the program parameters.

[0081] The term ‘comparison window’ as used herein includes reference to a segment of any one of the number of contiguous nucleic acid or amino acid positions selected from the group comprising of from 20 to 600, usually about 50 to about 200, more usually about 100 to about 150 in which a sequence may be compared to a reference sequence of the same number of contiguous positions after the two sequences are optimally aligned. Methods of alignment of sequences for comparison are known in the art. Optimal alignment of sequences for comparison can be conducted, e.g., by the local homology algorithm of Smith and Waterman (1970) Adv. Appl. Math. 2:482c, by the homology alignment algorithm of Needleman & Wunsch (1970) J. Mol. Biol., 48: 443, by the search for similarity method of Pearson & Lipman (1988) PNAS USA, 85: 2444, by computerized implementations of these algorithms (GAP, BESTFIT, FASTA, and TFASTA in the Wisconsin Genetics Software Package, Genetics Computer Group, 575 Science Dr., Madison, Wis.), or by manual alignment and visual inspection (see, e.g., Brent et al., (2003) Current Protocols in Molecular Biology).

[0082] Two examples of algorithms that are suitable for determining percent sequence identity and sequence similarity are the BLAST and BLAST 2.0 algorithms, which are described in Altschul et al., (1977) Nuc. Acids Res., 25: 3389-3402; and Altschul et al., (1990) J. Mol. Biol., 215: 403-410, respectively. Software for performing BLAST analyses is publicly available through the National Center for Biotechnology Information.

[0083] The BLAST algorithm also performs a statistical analysis of the similarity between two sequences (see, e.g., Karlin & Altschul (1993) PNAS. USA, 90: 5873-5787). One measure of similarity provided by the BLAST algorithm is the smallest sum probability (P(N)), which provides an indication of the probability by which a match between two nucleotide or amino acid sequences would occur by chance. For example, a nucleic acid is considered similar to a reference sequence if the smallest sum probability in a comparison of the test nucleic acid to the reference nucleic acid is less than about 0.2, more preferably less than about 0.01, and most preferably less than about 0.001.

[0084] The percent identity between two amino acid sequences can also be determined using the algorithm of E. Meyers and W. Miller (Comput. Appl. Biosci. 4:11-17 (1988)) which has been incorporated into the ALIGN program (version 2.0), using a PAM120 weight residue table, a gap length penalty of 12 and a gap penalty of 4. In addition, the percent identity between two amino acid sequences can be determined using the Needleman & Wunsch (supra) algorithm which has been incorporated into the GAP program in the GCG software package (available at www.gcg.com), using either a Blossom 62 matrix or a PAM250 matrix, and a gap weight of 16, 14, 12, 10, 8, 6, or 4 and a length weight of 1, 2, 3, 4, 5, or 6.

[0085] A polypeptide is typically substantially identical to a second polypeptide, for example, where the two peptides differ only by conservative substitutions. Another indication that two nucleic acid sequences are substantially identical is that the two molecules or their complements hybridize to each other under stringent conditions.

[0086] The term ‘nucleic acid’ is used herein interchangeably with the term ‘polynucleotide’ and refers to deoxyribonucleotides or ribonucleotides and polymers thereof in either single- or double-stranded form. The term encompasses nucleic acids containing known nucleotide analogs or modified backbone residues or linkages, which are synthetic, naturally occurring, and non-naturally occurring, which have similar binding properties as the reference nucleic acid, and which are metabolized in a manner similar to the reference nucleotides. Examples of such analogs include, without limitation, phosphorothioates, phosphoramidates, methyl phosphonates, chiral-methyl phosphonates, 2-O-methyl ribonucleotides, peptide-nucleic acids (PNAs).

[0087] Unless otherwise indicated, a particular nucleic acid sequence also implicitly encompasses conservatively modified variants thereof (e.g., degenerate codon substitutions) and complementary sequences, as well as the sequence explicitly indicated. Specifically, degenerate codon substitutions may be achieved by generating sequences in which the third position of one or more selected (or all) codons is substituted with mixed-base and/or deoxyinosine residues (Batzer et al., (1991) Nucleic Acid Res., 19: 5081; Ohtsuka et al., (1985) J Biol Chem., 260: 2605-2608; and Rossolini et al., (1994) Mol Cell Probes, 8: 91-98). As used herein, the term, ‘optimized nucleotide sequence’ means that the nucleotide sequence has been altered to encode an amino acid sequence using codons that are preferred in the production cell, e.g. a Chinese Hamster Ovary cell (CHO). The optimized nucleotide sequence is engineered to retain completely the amino acid sequence originally encoded by the starting nucleotide sequence, which is also known as the ‘parental’ sequence. In particular embodiments, the optimized sequences herein have been engineered to have codons that are preferred in CHO mammalian cells.

### Therapeutic Fusion Proteins

### Solubilizing Domain

[0088] As described herein, the therapeutic fusion proteins of the present disclosure comprise more than one domain (multidomain fusion proteins), e.g. an integrin binding domain and a PS binding domain. In addition, the fusion proteins also comprise an additional domain that confers a number of desirable properties on the fusion protein. This additional domain, which has been termed a ‘solubilizing domain’ for the purposes of this application, confers improved biological properties such as increased solubility, reduced aggregation and increased bioactivity. As a result, the fusion protein can show desirable pharmacokinetic profile and in particular properties facilitating manufacturing, storage and utility as therapeutic agents. Furthermore the presence of a solubilizing domain improves the stability of the therapeutic fusion protein and results in improved expression of the fusion protein compared to wild-type protein in cell expression systems as shown by an increase in yield following purification.

[0089] The presence of a solubilizing domain may also confer an extended half-life on the therapeutic fusion protein.

[0090] In some embodiments the solubilizing domain is an albumin protein such as human serum albumin (HSA; SEQ ID NO: 4) or variants thereof. For example, HSA comprising the amino acid substitution C34S to lower aggregation propensity (SEQ ID NO: 5), or domains of HSA such as HSA D3; (SEQ ID NO: 6). HSA has a very long serum half-life due to a number of factors including its relatively large size that reduces renal filtration and its neonatal Fc receptor (FcRn) binding feature thereby evading intracellular degradation. The use of N-terminal fragments of HSA for fusions to polypeptides has also been proposed (e.g. Patent application EP399666). Accordingly, genetically or chemically fusing or conjugating molecules to albumin can stabilize or extend the shelf-life, and/or retain a molecule's activity for extended periods of time in solution, in vitro and/or in vivo. Additional methods relating to HSA fusions can be found, for example, in international patent applications WO2001/077137 and WO2003/060071.

[0091] In some instances, the HSA variant has the same or substantially the same desirable pharmaceutical properties of HSA having the amino acid sequence of SEQ ID NO:50 (e.g., a serum half-life of 19-20 days; solubility of about 300 mg/mL; good stability; ease of expression; no effector function; low immunogenicity; and/or circulating serum levels of about 45 mg/mL). In some instances, the HSA used as the solubilizing domain is a genetic variant of HSA. In some instances, the HSA variant is any one of the 77 variants disclosed in Otagiri et al, 2009, Biol. Pharm. Bull. 32(4), 527-534 (2009). In certain embodiments, the HSA used as solubilizing domain is a mutated version of HSA that has improved affinity for the neonatal Fc receptor (FcRn) relative to the HSA of SEQ ID NO:4 (see e.g., U.S. Pat. Nos. 9,120,875; 9,045,564; 8,822,417; 8,748,380; Sand et al., Front. Immunol., 5:682 (2014); Andersen et al., J. Biol. Chem., 289(19): 13492-502 (2014); Oganesyan et al., J. Biol. Chem., 289(11):7812-24 (2014); Schmidt et al., Structure, 21(11): 1966-78 (2013); WO 2014/125082A1; WO 2011/051489, WO2011/124718, WO 2012/059486, WO 2012/150319; WO 2011/103076; and WO 2012/112188, all of which are incorporated by reference herein). In certain instances, the HSA mutant is the E505G/V547A mutant. In certain instances, the HSA mutant is the K573P mutant. Such HSA mutants that HSA that have improved affinity for FcRn can be used to increase the half-life of a fusion protein of the disclosed herein.

[0092] In some embodiments, the solubilizing domain comprises an antibody Fc domain such as human Fc-immunoglobulin G1 (Fc-IgG1; SEQ ID NO: 7). The Fc domain may also be modified, for example, by using knob-into-hole (KiH) based modifications to improve heterodimerization of Fc by introducing complementary amino acid substitutions in the CH3 domain of the Fc. For example, the substitution T366W to create a ‘knob’ on one CH3 domain and the substitutions T366S, L368A and Y407V to create a ‘hole’ on the other CH3 domain (Merchant et al (1998) Nat. Biotechnol., 16(7): 677-81; EU numbering IgG1). Additional modifications that can be included in the Fc domain either alone or combined with modifications to improve heterodimerization may comprise, for example, amino acid substitutions to cysteine to create an additional cysteine bond, for example S354C and/or Y349C, and amino acid substitutions to reduce or eliminate binding to Fcγ receptors and complement protein C1q, to ‘silence’ immune effector function. The so-called ‘LALA’ double mutation (L234A together with L235A; EU numbering) results in diminished effector functions (Lund et al., (1992) Mol Immunol., 29: 53-9). Alternatively, the ‘DAPA’ double mutation (D265A together with P329A; EU numbering) results in diminished effector functions. In an embodiment of the present disclosure, the Fc domain may comprise the amino acid substitutions D265A, P329A for Fc silencing and/or the KiH amino acid substitutions T366W (knob) or T366S, L368A and Y407V (hole). In one embodiment, the Fc domain is derived from human IgG1 and comprises the amino acid substitutions D265A, P329A (SEQ ID NO: 8). In another embodiment, the Fc domain is derived from human IgG1 and comprises the amino acid substitutions D265A, P329A, S354C and the amino acid substitution T366W (Fc-IgG1-knob; SEQ ID NO: 9). In another embodiment, the Fc domain is derived from human IgG1 and comprises the amino acid substitutions D265A, P329A, Y349C and the amino acid substitutions T366S, L368A and Y407V (Fc-IgG1-hole; SEQ ID NO: 10).

### Integrin Binding Domains

[0093] Integrins are transmembrane receptors that facilitate cell-extracellular matrix (ECM) adhesion. Upon ligand binding, integrins activate signal transduction pathways that mediate cellular signals such as regulation of the cell cycle, organization of the intracellular cytoskeleton, and movement of new receptors to the cell membrane (Giancotti & Ruoslahti (1999) Science, 285 (5430): 1028-32). The presence of integrins allows rapid and flexible responses to events at the cell surface. Several types of integrins exist, and one cell may have multiple different types on its surface. Integrins have two subunits: α (alpha) and β (beta), which each penetrate the plasma membrane and possess several cytoplasmic domains (Nermut M V et al (1988). EMBO J., 7 (13): 4093-9). An acidic amino acid features in the integrin-interaction site of many ECM proteins, for example as part of the amino acid sequence Arginine-Glycine-Aspartic acid (‘RGD’ in the one-letter amino acid code). The RGD motif has been found in numerous matrix proteins such as fibronectin, fibrinogen, vitronectin and osteopontin and aids in cell adhesion. The RGD motif is found in a number of proteins in a conserved protein domain known as an EGF-like domain, which derived its name from epidermal growth factor where it was first described. The EGF-like domain is one of most common domains found in extracellular proteins (Hidai C (2018) Open Access J Trans Med Res., 2(2): 67-71) and some examples of EGF-like domains which contain an RGD binding motif are listed below in Table 1.

TABLE 1
Examples of proteins comprising EGF-like domain proteins
containing an RGD integrin binding motif

| Abbre- | | | |
|---|---|---|---|
| viation | UniProtKB | Name | Reference |
| EDIL3 | O43854 | EGF like repeat and | Schurpf T et al., |
| | | discoidin domain 3 | (2012) |
| MFG-E8 | Q08431 | Milk Fat Globule-EGF | Taylor MR et al., |
| | | Factor 8 Protein | (1997) |
| NRG1 | Q02297 | Neuregulin-1 | Leguchi K et al., |
| | | | (2010) |
| IGFBP-1 | P08833 | Insulin-like growth factor | Haywood NJ et al., |
| | | binding protein 1 | (2017) |
| P2Y2R | P41231 | P2Y2 nucleotide receptor | Erb L et al., |
| | | | (2001) |

[0094] The term ‘integrin binding domain’ as used herein refers to a stretch of amino acids, or protein domain, that has the function of binding to integrins In an embodiment of the present disclosure, ‘integrin binding domain’ as used herein refers to a stretch of amino acids, or protein domain, that has the function of binding to integrins and comprising a RGD motif. In an embodiment of the present disclosure, the integrin binding domain is an EGF-like domain from human MFG-E8 having the amino acid sequence as set forth in SEQ ID NO: 2. In an alternative embodiment of the present disclosure, the integrin binding domain is an EGF-like domain from human EDIL3 (any one of the following sequences: SEQ ID NO: 11, SEQ ID NO: 77, SEQ ID NO: 96, SEQ ID NO: 97, SEQ ID NO: 98, SEQ ID NO: 99, SEQ ID NO: 100, or SEQ ID NO: 101); e,g., where the EGF-like domains can be found within the stretch of amino acids 1-132 of SEQ ID NO: 11.

[0095] The term ‘binds to integrin(s)’ as used herein refers to an integrin binding activity. Integrin binding activity can be determined by methods well known in the art. For example, an integrin adhesion assay is described in the Examples, section 3.2 in which the adherence of fluorescently labelled αvβ3 integrin-expressing lymphoma cells to therapeutic fusion proteins of the present disclosure was determined. An integrin binding domain is considered to have integrin binding activity if it has at least 10%, such as e.g. at least 25%, at least 50%, at least 75%, more preferably at least 80%, such as at least 90%, at least 95%, at least 96%, at least 97%, at least 98% of the integrin binding activity as observed for the human MFG-E8 protein (SEQ ID NO:1) when tested by the same method of determining the respective activity, preferably when tested using the assay described in the Examples, section 3.2.

### Phosphatidylserine Binding Domains

[0096] ‘Phosphatidylserine’ (PS), as used herein, relates to the phospholipid, which is a component of the cell membrane. PS is mostly confined to the inner leaflet of the cell membrane, while phosphatidylcholine and sphingomyelin are localized largely to the outer leaflet. The asymmetric distribution of phospholipids is maintained by the action of flippases (P4-ATPases such as ATP11A and 110) in the plasma membrane to actively translocate PS from the outer leaflet to the inner leaflet. Cell surface exposure of PS is observed not only in apoptotic cells, but also in activated lymphocytes, activated platelets, aged erythrocytes, and some cancer cells and the respective microparticles (Sakuragi et al., (2019) PNAS USA, 116(8): 2907-12). PS exposure can be a biomarker for a prothrombotic, inflammatory or ischemic disease state (Pasalic et al., (2018) J Thromb Haemost., 16(6): 1198-2010; Ma et al., (2017) supra; Zhao et al., (2016) supra. PS has a function in a multitude of cell signaling pathways and as essential phospholipid in coagulation where it can act as enhancer formation of the tenase (factors IXa, Villa and X) and prothrombinase (factors Xa, Va and prothrombin) complexes (Spronk et al., (2014) Thromb Res. 133 (Suppl 1): S54-6). Possibly the most understood function of externalized PS is still the ‘eat-me’ marker for phagocytic cells such as macrophages to engulf apoptotic cells, cell debris or PS-exposing activated cells. The term ‘phosphatidylserine binding domain’ or ‘PS binding domain’ as used herein refers to a stretch of amino acids, or protein domain, that has the function of binding to PS. Examples of endogenous proteins with PS binding domains can be found in Table 2 below.

TABLE 2
Examples of receptors/proteins with phosphatidylserine binding domains

| | | | Putative PS | |
|---|---|---|---|---|
| Abbreviation | UniProt | Name | binding domain | Reference |
| EDIL3 | O43854 | EGF like repeats and | C1-C2 discoidin | Dasgupta et al., |
| | | discoidin domains 3 | domains | (2012) |
| MFG-E8 | Q08431 | milk fat globule-EGF factor | C1-C2 discoidin | Andersen et al., |
| | | 8 protein, lactadherin | domains | (2000) |
| BAI1 | O14514 | Brain-specific | thrombospondin | Park et al., |
| | | angiogenesis inhibitor 1 | type 1 repeats | (2007) |
| TIM1 | Q96D42 | T-cell immunoglobulin | IgSF-V domain | Kobayashi et al., |
| | | and mucin domain- | | (2007) |
| | | containing protein 1 | | |
| TIM3 | Q8TDQ0 | T-cell immunoglobulin | IgSF-V domain | Cao et al., |
| | | and mucin domain- | | (2007) |
| | | containing protein 3 | | |
| TIM4 | Q96H15 | T-cell immunoglobulin | IgSF-V domain | Kobayashi et al., |
| | | and mucin domain- | | (2007) |
| | | containing protein 4 | | |
| Stab1/Stab2 | Q9NY15/ | Stabilin-1 and -2 | EGF-like domain | Park SY et al., |
| | Q8WWQ8 | | repeats (EGFrps) | (2009) |
| | | | in the extracellular | |
| | | | region | |
| TLT2 | Q5T2D2 | Triggering receptor | IgSF domain | de Freitas et al., |
| | | expressed on myeloid | | (2012) |
| | | cells-like protein 2 | | |
| TREM2 | Q9NZC2 | Triggering receptor | IgSF-V domain | Takahashi et al., |
| | | expressed on myeloid | | (2005) |
| | | cells 2 | | |
| CD300a | Q9U6N4 | CD300a molecule | IgSF-V domain | Simhadri et al., |
| | | | | (2012) |
| RAGE | Q15109 | Receptor for advanced | | He et al., (2011) |
| | | glycation end products | | |
| AxV | P08758 | Annexin V | | Ravanat et al., |
| | | | | (1992) |
| PSR | | Phosphatidylserine | | Mo et al., (2003) |
| | | receptor | | |
| CD36 | P16671 | Platelet glycoprotein 4, | | Banesh et al., |
| | | | | (2018) |
| CD68 | P34810 | Scavenger Receptor | | Chistiakov et al., |
| | | Class D | | (2017) |

[0097] In an embodiment of the present disclosure, the PS domain is derived from human MFG-E8 having the amino acid sequence as set forth in SEQ ID NO: 3. In an alternative embodiment of the present disclosure, the integrin binding domain is a PS binding domain from human EDIL3 (SEQ ID NO: 11), where the PS binding domain comprises amino acids 135-453 of SEQ ID NO: 11.

[0098] PS binding activity can be determined by methods well known in the art. For example, a PS binding assay is described in the Examples, section 3.1, wherein the binding of fusion proteins of the present disclosure to PS coated on microtiter plates was assessed by competing against the binding of biotinylated murine MFG-E8. In accordance with the present disclosure, a PS binding domain is considered to have PS binding activity if it has at least 10%, such as e.g. at least 25%, at least 50%, at least 75%, at least 80%, preferably at least 90%, at least 95%, at least 96%, at least 97%, at least 98% of the PS binding activity as observed for the human MFG-E8 protein shown in SEQ ID NO:1 when tested by the same method of determining the respective activity, preferably when tested using the assay described in the Examples, section 3.1.

### Bridging Proteins

[0099] There are a number of endogenous proteins that comprise both an integrin binding domain and a PS binding domain. Examples of such ‘bridging proteins’ are shown in Table 3 below.

TABLE 3
Bridging proteins containing both integrin and phosphatidylserine binding domains

| | | | Putative PS- | Receptor on | |
|---|---|---|---|---|---|
| Abbreviation | UniProt | Name | binding domain | phagocytes | Reference |
| EDIL3 | O43854 | EGF like repeats | C1-C2 discoidin | integrins | Dasgupta et |
| (DEL-1) | | and discoidin | domains | (αv-β2) | at., (2012) |
| | | domains 3 | | | |
| MFG-E8 | Q08431 | milk fat globule- | C1-C2 discoidin | integrins | Andersen et |
| | | EGF factor 8 | domains | (αvb3/b5 α8b1) | al., (2000) |
| | | protein, | | | |
| | | lactadherin | | | |
| Pros1 | P07225 | Protein S | γ-carboxyglutamic | Tyro3 and Mer | Stitt et al., |
| | | | acid (Gla) domain | “anticoagulation | (1995) |
| | | | | factor” | |
| Gas6 | Q14393 | Growth arrest | Gia domain | Tyro3, Mer and | Stitt et al., |
| | | specific protein 6 | | AXL | (1995) |

[0100] To be of therapeutic value, it is useful if the bridging protein comprises an integrin binding domain that recognizes integrins on phagocytes that are typically not sensitive to proteolytic cleavage or shedding as has been observed in TAM family members or other PS binding receptors. A protein with a PS binding domain and an integrin binding domain, for example, MFG-E8 or its paralogue EDIL3/DEL1, have been shown to induce efferocytosis in vitro and therefore could be of therapeutic value as efferocytosis inductors in AOIs. In contrast, the GAS6 protein for example, may not be particularly effective in promoting efferocytosis in AOIs because its receptor on phagocytes (MerTK) is proteolytically cleaved during inflammation and infection as outline above.

[0101] One example of a bridging protein, as listed in Table 3 above, is MFG-E8, which is one of the major proteins found in the milk fat globule membrane (MFGM). MFG-E8 is expressed and secreted by several different types of cells (e.g. mammary epithelial cells, vascular cells, epididymal epithelial cells, aortic smooth muscle cells, activated macrophages, stimulated endometrium, and immature dendritic cells) and tissues (e.g. Heart, lungs, mammary glands, spleen, intestines, liver, kidney, brain, blood, and endothelium). The MFG-E8 protein is also known by several different names such as, lactadherin, BP47, components 15/16, MFGM, MGP57/53, PAS-6/PAS-7glycoprotein, cell wall protein SED1, sperm surface protein SP47, breast epithelial antigen BA46, and O-acetyl GD3 ganglioside synthase (AGS). The MFG-E8 gene is located on chromosome 1 in rats, chromosome 7 in mice, and chromosome 15 in humans. Alternative splicing of the pre-mRNA of MFG-E8 results in three isoforms of the human protein and two forms of mRNA, long and short variants are expressed in mouse mammary glands. The human MFG-E8 gene (UniProtKB-Q08431) encodes a protein that is 387 residues long that is processed to form multiple protein products. The amino acid sequence of human MFG-E8, which comprises the signal peptide (residues 1-23; underlined), EGF-like domain (residues 24-67; italicized), C1 domain (residues 70-225; bold), and C2 domain (residues 230-387; bold and underlined), is provided below:

(SEQ ID NO: 1)
MPRPRLLAAL CGALLCAPSL LYALDICSKN
PCHNGGLCEE ISQEVRGDVF PSYTCTCLKG
YAGNHCETKC VEPLGLENGN IANSQIAASS
VRVTFLGLQH WVPELARLNR AGMVNAWTPS
SNDDNPWIQV NLLRRMWVTG VVTQGASRLA
SHEYLKAFKV AYSLNGHEFD FIHDVNKKHK
EFVGNWNKNA VHVNLFETPV EAQYVRLYPT
SCHTACTLRF ELLGCELNGC ANPLGLKNNS
IPDKQITASS SYKTWGLHLF SWNPSYARLD
KQGNFNAWVA GSYGNDQWLQ VDLGSSKEVT
GIITQGARNF GSVQFVASYK VAYSNDSANW
TEYQDPRTGS SKIFPGNWDN HSHKKNLFET
PILARYVRIL PVAWHNRIAL RLELLGC.

[0102] MFG-E8 lacks the transmembrane function that MFGM has and therefore serves as a peripheral membrane protein. Human MFG-E8 consists of one N-terminal EGF-like domain (SEQ ID NO: 2) that binds to αvβ3 and αvβ5 integrins expressed on phagocytes and a PS binding domain (SEQ ID NO: 3) comprising two F5/8-discoidin sub-domains (C1 and C2) that bind with high affinity to anionic phospholipids. The integrin-binding is a result of the RGD motif located in residues 46-48 of human MFG-E8 (SEQ ID NO: 1). Apoptotic cells, cell debris, hyperactivated cells and the majority of microparticles (MPs) expose PS and are targets of MFG-E8 that, acting as a bridging molecule, opsonizes these cells and microparticles and links them to αvβ3 and αvβ5 integrins on phagocytes. This bridging action triggers an efficient engulfment program leading to internalization of the cells, debris and microparticles. The proteins found in MFGM are highly conserved throughout species. MFG-E8 protein structure varies by species; all species currently known contain two C domains but differ on the number of EGF-like domains. For example, human MFG-E8 protein contains one EGF-like domain, whereas bovine MFG-E8 and murine MFG-E8 (SEQ ID NO: 68) have two EGF-like domains, and chicken, frog, and zebrafish have three EGF-like domains. Domains of MFG-E8, have been proposed previously as constituents of therapeutics, in particular the PS-binding domains (Kooijmans et al., (2018) Nanoscale, 10(5): 2413-2426) and fragments of MFG-E8 have been described to act in models of fibrosis (US patent application US2018/0334486).

[0103] The non-phlogistic uptake of dying cells, debris and microparticles by professional and nonprofessional phagocytes plays a critical role in homeostasis after tissue injury (Greenlee-Wacker (2016) supra). The importance of appropriate clearance became furthermore evident in genetic models where MFG-E8 knockout mice showed, for example, increased numbers of (uncleared) dying cells in tissues, exaggerated inflammatory response in disease models such as neonatal sepsis, autoimmunity, poor angiogenesis and impaired wound healing (Hanayama et al., (2004) Science, 204(5474): 1147-50; Das et al., (2016) J Immunol., 196(12): 5089-5100; Hansen et al., (2017) J Pediatr Surg., 52(9): 1520-7).

[0104] In addition, MFG-E8 has been shown to generate a tolerogenic environment by suppression of T cell activation and proliferation, inhibition of Th1, Th2, and Th17 subpopulations while increasing regulatory T cell subsets (Tregs). Interestingly, Tregs contribute in return to the resolution of inflammation by inducing efferocytosis by macrophages (Proto et al., (2018) Immunity, 49(4): 666-77). MFG-E8 has been described to promote allogeneic engraftment of embryonic stem cell-derived tissues across the MHC barrier (Tan et al., (2015) Stem Cell Reports, 5(5): 741-752). MFG-E8 also has multiple nutritional uses, which aid in promoting tissue development and protection against infectious agents. Glycoproteins such as MFG-E8 are potential health enhancing nutraceuticals for food and pharmaceutical applications. MFG-E8 can also be combined with other nutrients (e.g. probiotics, whey protein micelles, alpha-hyroxyisocaproic acid, citrulline, and branched chain fatty acids).

### Other Solubilizing Domains

[0105] In some embodiments, the solubilizing domain comprises an antibody Fc domain such as human Fc-immunoglobulin G1 (Fc-IgG1; SEQ ID NO: 7). The Fc domain may also be modified, for example, by using knob-into-hole (KiH) based modifications to improve heterodimerization of Fc by introducing complementary amino acid substitutions in the CH3 domain of the Fc. For example, the substitution T366W to create a ‘knob’ on one CH3 domain and the substitutions T366S, L368A and Y407V to create a ‘hole’ on the other CH3 domain (Merchant et al (1998) Nat. Biotechnol., 16(7): 677-81; EU numbering IgG1). Additional modifications that can be included in the Fc domain either alone or combined with modifications to improve heterodimerization may comprise, for example, amino acid substitutions to cysteine to create an additional cysteine bond, for example S354C and/or Y349C, and amino acid substitutions to reduce or eliminate binding to Fcγ receptors and complement protein C1q, to ‘silence’ immune effector function. The so-called ‘LALA’ double mutation (L234A together with L235A; EU numbering) results in diminished effector functions (Lund et al., (1992) Mol Immunol., 29: 53-9). Alternatively, the ‘DAPA’ double mutation (D265A together with P329A; EU numbering) results in diminished effector functions. In an embodiment of the present disclosure, the Fc domain may comprise the amino acid substitutions D265A, P329A for Fc silencing and/or the KiH amino acid substitutions T366W (knob) or T366S, L368A and Y407V (hole). In one embodiment, the Fc domain is derived from human IgG1 and comprises the amino acid substitutions D265A, P329A (SEQ ID NO: 8). In another embodiment, the Fc domain is derived from human IgG1 and comprises the amino acid substitutions D265A, P329A, S354C and the amino acid substitution T366W (Fc-IgG1-knob; SEQ ID NO: 9). In another embodiment, the Fc domain is derived from human IgG1 and comprises the amino acid substitutions D265A, P329A, Y349C and the amino acid substitutions T366S, L368A and Y407V (Fc-IgG1-hole; SEQ ID NO: 10).

[0106] In some embodiments, the the solubilizing domain comprises an antibody Fc domain derived from human IgA, IgD, IgE or IgM.

[0107] In some embodiments, the solubilizing domain comprises SUMO (Small Ubiquitin-like Modifier), Ubiquitin, GST (Glutathion S-transferase), or variants thereof.

### Linkage and Orientation of Domains of Therapeutic Fusion Proteins

[0108] The integrin binding domain, PS binding domain and solubilizing domain of the fusion proteins of the present disclosure are linked. As used herein, the term ‘linked’ or ‘linking’ refers to one domain of the fusion protein being attached, directly or indirectly, to another domain of the fusion protein. Direct attachment is a form of linkage, and is referred to herein as ‘fused’ or ‘fusion’. Using a molecule having the form A-B-C as an example: domain A is linked directly to domain B and linked directly to domain C. As such, domain A may also be described as being fused to domain B which is fused to domain C. As another example, domain A is linked directly to domain B and linked indirectly to domain C. As such, domain A may also be described as being fused to domain B which is linked indirectly by an internal linker to domain C.

[0109] In some embodiments the linkage is a direct linkage and the domains are therefore fused to each other. In some embodiments an integrin binding domain is fused to a PS binding domain that is fused to a solubilizing domain. Specifically, the PS binding domain (e.g. C1-C2 discoidin sub-domains) is fused to the C-terminus of the integrin binding domain (e.g. an EGF-like domain) and fused to the N-terminus of the solubilizing domain (e.g. HSA). In some embodiments a solubilizing domain is fused to an integrin binding domain that is fused to a PS binding domain. Specifically, the integrin binding domain (e.g. an EGF-like domain) is fused to the C-terminus of the solubilizing domain (e.g. HSA) and fused to the N-terminus of the PS binding domain (e.g. C1-C2 discoidin sub-domains). In some embodiments, an integrin binding domain is fused to a PS binding domain comprising C1-C2 discoidin sub-domains and a solubilizing domain is inserted between the C1-C2 discoidin sub-domain. Specifically, C terminus of the integrin binding domain (e.g. an EGF-like domain) is fused to the N-terminus of the C1 discoidin sub-domain and the C-terminus of the C1 discoidin sub-domain is fused to the N-terminus of the solubilizing domain (e.g. HSA) and the C-terminus of the solubilizing domain is fused to the N-terminus of the C2 discoidin sub-domain. In another embodiment, an integrin binding domain is fused to a solubilizing domain which is fused to a PS binding domain. Specifically, the solubilizing domain (e.g. HSA) is fused to the C-terminus of the integrin binding domain (e.g. EGF-like domain) and to the N-terminus of the PS binding domain (e.g. C1-C2 discoidin sub-domains). In one embodiment, HSA is fused to the C-terminus of an EGF-like domain and fused to the N-terminus of the C1 discoidin domain.

[0110] In some embodiments, the solubilizing domain (e.g. HSA) is fused between an integrin binding domain and a PS binding domain. In some embodiments, the integrin binding domain is located at the N-terminus of the fusion protein and the PS binding domain is located at the C-terminus of the fusion protein.

[0111] In some embodiments, the fusion protein comprises a first region containing an integrin binding domain, e.g. EGF-like domain, a second region containing a solubilizing domain (e.g. HSA or Fc), and a third region containing the PS binding domain, e.g. C1 and/or C2 discoidin domain. In some embodiments, the integrin binding domain is located at the N-terminus of the fusion protein and the PS binding domain is located at the C-terminus of the fusion protein.

[0112] In some embodiments, the solubilizing domain (e.g. HSA or Fc) is HSA.

[0113] In some embodiments, the solubilizing domain is HSA, or a functional variant therefore.

[0114] In some embodiments, the solubilizing domain is the antibody Fc-immunoglobulin G1 (Fc-IgG1; SEQ ID NO: 7).

[0115] In a preferred embodiment, HSA comprising an amino acid sequence as set forth in SEQ ID NO: 5 is fused to the C-terminus of the EGF-like domain of MFG-E8 and fused to the N-terminus of the PS binding domain of MFG-E8. In one embodiment, the fusion protein comprises an amino acid sequence as set forth in SEQ ID NO: 46 (FP068). In one embodiment, the fusion protein comprises an amino acid sequence as set forth in SEQ ID NO: 48 (FP776).

[0116] In an alternative embodiment, HSA comprising an amino acid sequence as set forth in SEQ ID NO: 5 is fused to the C-terminus of the EGF-like domain of EDIL3 and fused to the N-terminus of the PS binding domain of EDIL3. In one embodiment, the fusion protein comprises an amino acid sequence as set forth in SEQ ID NO: 70 (FP1068). In one embodiment, the fusion protein comprises an amino acid sequence as set forth in SEQ ID NO: 69 (FP1776).

[0117] In some embodiments, the linkage is via a polypeptide linker and a polypeptide linker that, for example, joins an solubilizing domain to a PS binding domain in a fusion protein of the present disclosure is referred to as an ‘external linker’. These external linkers typically comprise glycine (G) and/or serine (S) and may also comprise glycine and leucine (GL) or glycine and valine (GL). In some embodiments the linker comprises multiples of G and S residues, for example, G₂S and multiples thereof such as (G₂S)₄ as set forth in SEQ ID NO: 62, (GS)₄ as set forth in SEQ ID NO: 63, G₄S as set forth in SEQ ID NO: 64 or (G₄S)₂ as set forth in SEQ ID NO: 65.

[0118] In some embodiments, an external linker is fused between the C-terminus of an integrin binding domain and the N-terminus of a solubilizing domain. Specifically, an external linker is fused to the C-terminus of an EGF-like domain and the N-terminus of HSA. In some embodiments, an external linker is fused between the C-terminus of a solubilizing domain and the N-terminus of a PS binding domain. Specifically an external linker is fused to the C-terminus of HSA and the N-terminus of the PS binding domain. In some embodiments, an external linker is fused between the C-terminus of an integrin binding domain and the N-terminus of a solubilizing domain, and an additional external linker is fused between the C-terminus of the solubilizing domain and the N-terminus of a PS binding domain. Specifically, an external linker is fused to the C-terminus of an EGF-like domain and the N-terminus of HSA, and an additional external linker is fused to the C-terminus of HSA and the N-terminus of a PS binding domain.

[0119] In some embodiments, an external linker comprising GS is fused to the C-terminus of an integrin binding domain and to the N-terminus of a solubilizing domain. In some embodiments, an external linker comprising GL is fused to the C-terminus of a solubilizing domain and to the N-terminus of a PS binding domain. In some embodiments, an external linker comprising (G₂S)₄ (SEQ ID NO: 62) is fused to the C-terminus of a solubilizing domain and to the N-terminus of a PS binding domain. In some embodiments, an external linker comprising G₄S (SEQ ID NO: 64) is fused to the C-terminus of a solubilizing domain and to the N-terminus of a PS binding domain. In some embodiments, an external linker comprising (G₄S)₂ (SEQ ID NO: 65) is fused to the C-terminus of a solubilizing domain and to the N-terminus of a PS binding domain.

[0120] In one embodiment, an external linker comprising GS is fused to the C-terminus of an EGF-like domain and to the N-terminus of HSA. A fusion protein of the present disclosure comprising this structure has an amino acid sequence as set forth in SEQ ID NO: 42 (FP330).

[0121] In one embodiment, an external linker comprising GS is fused to the C-terminus of an EGF-like domain and to the N-terminus of HSA, and a further external linker comprising (GS)₄ (SEQ ID NO: 63) is fused to the C-terminus of HSA and to the N-terminus of a PS binding domain).

[0122] In one embodiment, an external linker comprising GS is fused to the C-terminus of an EGF-like domain and to the N-terminus of HSA, and a further external linker comprising (G₂S)₄ (SEQ ID NO: 62) is fused to the C-terminus of HSA and to the N-terminus of a PS binding domain. A fusion protein of the present disclosure comprising this structure has an amino acid sequence as set forth in SEQ ID NO: 42 (FP330).

[0123] In one embodiment, an external linker comprising GS is fused to the C-terminus of an EGF-like domain and to the N-terminus of HSA. The C-terminus of HSA is directly fused to the N-terminus of a PS binding domain.

[0124] In one embodiment, an external linker comprising GS is fused to the C-terminus of an EGF-like domain and to the N-terminus of HSA, and an additional external linker comprising G₄S (SEQ ID NO: 64) is fused to the C-terminus of HSA and to the N-terminus of a PS binding domain. A fusion protein of the present disclosure comprising this structure has an amino acid sequence as set forth in SEQ ID NO: 54 (FP811).

[0125] In one embodiment, an external linker comprising GS is fused to the C-terminus of an EGF-like domain and to the N-terminus of HSA, and a further external linker comprising (G₄S)₂ (SEQ ID NO: 65) is fused to the C-terminus of HSA and to the N-terminus of a PS binding domain. A fusion protein of the present disclosure comprising this structure has an amino acid sequence as set forth in SEQ ID NO: 56 (FP010).

[0126] In some embodiments, a His tag is fused to an external linker comprising GS (GS-6×His; SEQ ID NO: 66) which is fused to the C-terminus of a PS binding domain. In one embodiment, a fusion protein of the present disclosure comprising a His tag has an amino acid sequence as set forth in SEQ ID NO: 44 (FP278) or SEQ ID NO: 60 (FP114 or FP260).

### Functional Properties of Therapeutic Fusion Proteins

[0127] The present disclosure provides fusion proteins derived from human MFG-E8 and which are effective in promoting efferocytosis and therefore are active in eliminating the key drivers of systemic inflammation and microvascular pathology. As set out in the Examples, the fusion proteins having the general structure EGF-HSA-C1-C2 have been shown to be effective in a number of efferocytosis assays. For example, the fusion proteins have been effective in restoring lipopolysaccharide (LPS) or S. aureus impaired efferocytosis of macrophages and boosting efferocytosis of microparticles and dying cells by endothelial cells. The fusion proteins have also been effective in protecting kidney function and protecting against bodyweight loss in a mouse model of acute kidney injury.

### Exemplary Protein Sequences

[0128] The amino acid sequences in Table 4 include examples of therapeutic fusion proteins of the present disclosure, as well as portions thereof.

[0129] Throughout the text of this application, should there be a discrepancy between the text of the specification (e.g., Table 4) and the sequence listing, the text of the specification shall prevail.

TABLE 4
Exemplary Protein Sequences

| SEQ | | |
|---|---|---|
| ID NO | Description | Sequence |
| 1 | Human | MPRPRLLAALCGALLCAPSLLVALDICSKNPCHNGGLCEEISQEVRGDVFPSYTC |
| | MFG-E8 | TCLKGYAGNHCETKCVEPLGLENGNIANSQIAASSVRVTFLGLQHWVPELARLN |
| | | RAGMVNAWTPSSNDDNPWIQVNLLRRMWVTGVVTQGASRLASHEYLKAFKVA |
| | | YSLNGHEFDFIHDVNKKHKEFVGNWNKNAVHVNLFETPVEAQYVRLYPTSCHTA |
| | | CTLRFELLGCELNGCANPLGLKNNSIPDKQITASSSYKTWGLHLFSWNPSYARLD |
| | | KQGNFNAWVAGSYGNDQWLQVDLGSSKEVTGIITQGARNFGSVQFVASYKVAY |
| | | SNDSANWTEYQDPRTGSSKIFPGNWDNHSHKKNLFETPILARYVRILPVAWHNR |
| | | IALRLELLGC |
| 2 | EGF-like | LDICSKNPCHNGGLCEEISQEVRGDVFPSYTCTCLKGYAGNHCETK |
| | domain of MFG- | |
| | E8 | |
| 3 | PS binding | CVEPLGLENGNIANSQIAASSVRVTFLGLQHWVPELARLNRAGMVNAWTPSSND |
| | domain of MFG- | DNPWIQVNLLRRMWVTGVVTQGASRLASHEYLKAFKVAYSLNGHEFDFIHDVNK |
| | E8 | KHKEFVGNWNKNAVHVNLFETPVEAQYVRLYPTSCHTACTLRFELLGCELNGCA |
| | (C1-C2 sub- | NPLGLKNNSIPDKQITASSSYKTWGLHLFSWNPSYARLDKQGNFNAWVAGSYG |
| | domains) | NDQWLQVDLGSSKEVTGIITQGARNFGSVQFVASYKVAYSNDSANWTEYQDPR |
| | | TGSSKIFPGNWDNHSHKKNLFETPILARYVRILPVAWHNRIALRLELLGC |
| 4 | HSA wild-type | DAHKSEVAHRFKDLGEENFKALVLIAFAQYLQQCPFEDHVKLVNEVTEFAKTCVA |
| | | DESAENCDKSLHTLFGDKLCTVATLRETYGEMADCCAKQEPERNECFLQHKDD |
| | | NPNLPRLVRPEVDVMCTAFHDNEETFLKKYLYEIARRHPYFYAPELLFFAKRYKA |
| | | AFTECCQAADKAACLLPKLDELRDEGKASSAKQRLKCASLQKFGERAFKAWAVA |
| | | RLSQRFPKAEFAEVSKLVTDLTKVHTECCHGDLLECADDRADLAKYICENQDSIS |
| | | SKLKECCEKPLLEKSHCIAEVENDEMPADLPSLAADFVESKDVCKNYAEAKDVFL |
| | | GMFLYEYARRHPDYSWLLLRLAKTYETTLEKCCAAADPHECYAKVFDEFKPLVE |
| | | EPQNLIKQNCELFEQLGEYKFQNALLVRYTKKVPQVSTPTLVEVSRNLGKVGSK |
| | | CCKHPEAKRMPCAEDYLSVVLNQLCVLHEKTPVSDRVTKCCTESLVNRRPCFSA |
| | | LEVDETYVPKEFNAETFTFHADICTLSEKERQIKKQTALVELVKHKPKATKEQLKA |
| | | VMDDFAAFVEKCCKADDKETCFAEEGKKLVAASQAAL |
| 5 | HSA (C34S) | DAHKSEVAHRFKDLGEENFKALVLIAFAQYLQQSPFEDHVKLVNEVTEFAKTCVA |
| | | DESAENCDKSLHTLFGDKLCTVATLRETYGEMADCCAKQEPERNECFLQHKDD |
| | | NPNLPRLVRPEVDVMCTAFHDNEETFLKKYLYEIARRHPYFYAPELLFFAKRYKA |
| | | AFTECCQAADKAACLLPKLDELRDEGKASSAKQRLKCASLQKFGERAFKAWAVA |
| | | RLSQRFPKAEFAEVSKLVTDLTKVHTECCHGDLLECADDRADLAKYICENQDSIS |
| | | SKLKECCEKPLLEKSHCIAEVENDEMPADLPSLAADFVESKDVCKNYAEAKDVFL |
| | | GMFLYEYARRHPDYSWLLLRLAKTYETTLEKCCAAADPHECYAKVFDEFKPLVE |
| | | EPQNLIKQNCELFEQLGEYKFQNALLVRYTKKVPQVSTPTLVEVSRNLGKVGSK |
| | | CCKHPEAKRMPCAEDYLSVVLNQLCVLHEKTPVSDRVTKCCTESLVNRRPCFSA |
| | | LEVDETYVPKEFNAETFTFHADICTLSEKERQIKKQTALVELVKHKPKATKEQLKA |
| | | VMDDFAAFVEKCCKADDKETCFAEEGKKLVAASQAAL |
| 6 | HSA D3 | LVEEPQNLIKQNCELFEQLGEYKFQNALLVRYTKKVPQVSTPTLVEVSRNLGKVG |
| | | SKCCKHPEAKRMPCAEDCLSVFLNQLCVLHEKTPVSDRVTKCCTESLVNGRPCF |
| | | SALEVDETYVPKEFNAETFTFHADICTLSEKERQIKKQTALVELVKHKPKATKEQL |
| | | KAVMDDFAAFVEKCCKADDKETCFAEEGKKLVAASQAALGL |
| 7 | Fc-IgG1 wild- | APELLGGPSVFLFPPKPKDTLMISRTPEVTRVVSDVSHEDPEVKFNWYVDGVEV |
| | type | HNAKTKPREEQYNSTYRWSVLTVLHQDWLNGKEYKCKVSNKALPAPIEKTISKA |
| | | KGQPREPQVYTLPPSREEMTKNQVSLTCLVKGFYPSDIAVEWESNGQPENNYK |
| | | TTPPVLDSDGSFFLYSKLTVDKSRWQQGNVFSCSVMHEALHNHYTQKSLSLSP |
| | | GK |
| 8 | Fc-IgG1 silent | APELLGGPSVFLFPPKPKDTLMISRTPEVTRVVSAVSHEDPEVKFNWYVDGVEV |
| | | HNAKTKPREEQYNSTYRVVSVLTVLHQDWLNGKEYKCKVSNKALAAPIEKTISKA |
| | | KGQPREPQVYTLPPSREEMTKNQVSLTCLVKGFYPSDIAVEWESNGQPENNYK |
| | | TTPPVLDSDGSFFLYSKLTVDKSRWQQGNVFSCSVMHEALHNHYTQKSLSLSP |
| | | GK |
| 9 | Fc-IgG1 Knob | APELLGGPSVFLFPPKPKDTLMISRTPEVTRVVSAVSHEDPEVKFNWYVDGVEV |
| | | HNAKTKPREEQYNSTYRWSVLTVLHQDWLNGKEYKCKVSNKALAAPIEKTISKA |
| | | KGQPREPQVYTLPPCREEMTKNQVSLWCLVKGFYPSDIAVEWESNGQPENNYK |
| | | TTPPVLDSDGSFFLYSKLTVDKSRWQQGNVFSCSVMHEALHNHYTQKSLSLSP |
| | | GK |
| 10 | Fc-IgG1 Hole | APELLGGPSVFLFPPKPKDTLMISRTPEVTRVVSAVSHEDPEVKFNWYVDGVEV |
| | | HNAKTKPREEQYNSTYRWSVLTVLHQDWLNGKEYKCKVSNKALAAPIEKTISKA |
| | | KGQPREPQVCTLPPSREEMTKNQVSLSCAVKGFYPSDIAVEWESNGQPENNYK |
| | | TTPPVLDSDGSFFLVSKLTVDKSRWQQGNVFSCSVMHEALHNHYTQKSLSLSP |
| | | GK |
| 11 | Human EDIL3 | DICDPNPCENGGICLPGLADGSFSCECPDGFTDPNCSSWEVASDEEEPTSAGP |
| | | CTPNPCHNGGTCEISEAYRGDTFIGYVCKCPRGFNGIHCQHNINECEVEPCKNG |
| | | GICTDLVANYSCECPGEFMGRNCQYKCSGPLGIEGGIISNQQITASSTHRALFGL |
| | | QKWYPYYARLNKKGLINAWTAAENDRWPWIQINLQRKMRVTGVITQGAKRIGSP |
| | | EYIKSYKIAYSNDGKTWAMYKVKGTNEDMVFRGNIDNNTPYANSFTPPIKAQYVR |
| | | LYPQVCRRHCTLRMELLGCELSGCSEPLGMKSGHIQDYQITASSIFRTLNMDMF |
| | | TWEPRKARLDKQGKVNAWTSGHNDQSQWLQVDLLVPTKVTGIITQGAKDFGHV |
| | | QFVGSYKLAYSNDGEHWTVYQDEKQRKDKVFQGNFDNDTHRKNVIDPPIYARHI |
| | | RILPWSWYGRITLRSELLGCTEEE |
| 12 | FP050 | DICDPNPCENGGICLPGLADGSFSCECPDGFTDPNCSSWEVASDEEEPTSAGP |
| | EDIL3 EGF- | CTPNPCHNGGTCEISEAYRGDTFIGYVCKCPRGFNGIHCQHNINECEVEPCKNG |
| | HSA-C1-C2 | GICTDLVANYSCECPGEFMGRNCQYKGSDAHKSEVAHRFKDLGEENFKALVLIA |
| | | FAQYLQQSPFEDHVKLVNEVTEFAKTCVADESAENCDKSLHTLFGDKLCTVATL |
| | | RETYGEMADCCAKQEPERNECFLQHKDDNPNLPRLVRPEVDVMCTAFHDNEET |
| | | FLKKYLYEIARRHPYFYAPELLFFAKRYKAAFTECCQAADKAACLLPKLDELRDE |
| | | GKASSAKQRLKCASLQKFGERAFKAWAVARLSQRFPKAEFAEVSKLVTDLTKVH |
| | | TECCHGDLLECADDRADLAKYICENQDSISSKLKECCEKPLLEKSHCIAEVENDE |
| | | MPADLPSLAADFVESKDVCKNYAEAKDVFLGMFLYEYARRHPDYSVVLLLRLAK |
| | | TYETTLEKCCAAADPHECYAKVFDEFKPLVEEPQNLIKQNCELFEQLGEYKFQNA |
| | | LLVRYTKKVPQVSTPTLVEVSRNLGKVGSKCCKHPEAKRMPCAEDYLSVVLNQL |
| | | CVLHEKTPVSDRVTKCCTESLVNRRPCFSALEVDETYVPKEFNAETFTFHADICT |
| | | LSEKERQIKKQTALVELVKHKPKATKEQLKAVMDDFAAFVEKCCKADDKETCFAE |
| | | EGKKLVAASQAALGLGGSGGSGGSGGSCSGPLGIEGGIISNQQITASSTHRALF |
| | | GLQKWYPYYARLNKKGLINAWTAAENDRWPWIQINLQRKMRVTGVITQGAKRIG |
| | | SPEYIKSYKIAYSNDGKTWAMYKVKGTNEDMVFRGNIDNNTPYANSFTPPIKAQY |
| | | VRLYPQVCRRHCTLRMELLGCELSGCSEPLGMKSGHIQDYQITASSIFRTLNMD |
| | | MFTWEPRKARLDKQGKVNAWTSGHNDQSQWLQVDLLVPTKVTGIITQGAKDFG |
| | | HVQFVGSYKLAYSNDGEHWTVYQDEKQRKDKVFQGNFDNDTHRKNVIDPPIYA |
| | | RHIRILPWSWYGRITLRSELLGC |
| 84 | EDIL3 EGF- | DICDPNPCENGGICLPGLADGSFSCECPDGFTDPNCSSWEVASDEEEPTGSDA |
| | like domain | HKSEVAHRFKDLGEENFKALVLIAFAQYLQQSPFEDHVKLVNEVTEFAKTCVADE |
| | 1 [EDIL3]-HSA- | SAENCDKSLHTLFGDKLCTVATLRETYGEMADCCAKQEPERNECFLQHKDDNP |
| | C1-C2[EDIL3] | NLPRLVRPEVDVMCTAFHDNEETFLKKYLYEIARRHPYFYAPELLFFAKRYKAAF |
| | | TECCQAADKAACLLPKLDELRDEGKASSAKQRLKCASLQKFGERAFKAWAVARL |
| | | SQRFPKAEFAEVSKLVTDLTKVHTECCHGDLLECADDRADLAKYICENQDSISSK |
| | | LKECCEKPLLEKSHCIAEVENDEMPADLPSLAADFVESKDVCKNYAEAKDVFLG |
| | | MFLYEYARRHPDYSVVLLLRLAKTYETTLEKCCAAADPHECYAKVFDEFKPLVEE |
| | | PQNLIKQNCELFEQLGEYKFQNALLVRYTKKVPQVSTPTLVEVSRNLGKVGSKC |
| | | CKHPEAKRMPCAEDYLSVVLNQLCVLHEKTPVSDRVTKCCTESLVNRRPCFSAL |
| | | EVDETYVPKEFNAETFTFHADICTLSEKERQIKKQTALVELVKHKPKATKEQLKAV |
| | | MDDFAAFVEKCCKADDKETCFAEEGKKLVAASQAALGLGGSGGSGGSGGSCS |
| | | GPLGIEGGIISNQQITASSTHRALFGLQKWYPYYARLNKKGLINAWTAAENDRWP |
| | | WIQINLQRKMRVTGVITQGAKRIGSPEYIKSYKIAYSNDGKTWAMYKVKGTNEDM |
| | | VFRGNIDNNTPYANSFTPPIKAQYVRLYPQVCRRHCTLRMELLGCELSGCSEPL |
| | | GMKSGHIQDYQITASSIFRTLNMDMFTWEPRKARLDKQGKVNAWTSGHNDQSQ |
| | | WLQVDLLVPTKVTGIITQGAKDFGHVQFVGSYKLAYSNDGEHWTVYQDEKQRK |
| | | DKVFQGNFDNDTHRKNVIDPPIYARHIRILPWSWYGRITLRSELLGC |
| 85 | EDIL3 EGF-like | SAGPCTPNPCHNGGTCEISEAYRGDTFIGYVCKCPRGFNGIHCQHGSDAHKSEV |
| | domain | AHRFKDLGEENFKALVLIAFAQYLQQSPFEDHVKLVNEVTEFAKTCVADESAENC |
| | 2[EDIL3]-HSA- | DKSLHTLFGDKLCTVATLRETYGEMADCCAKQEPERNECFLQHKDDNPNLPRLV |
| | C1-C2[EDIL3] | RPEVDVMCTAFHDNEETFLKKYLYEIARRHPYFYAPELLFFAKRYKAAFTECCQA |
| | | ADKAACLLPKLDELRDEGKASSAKQRLKCASLQKFGERAFKAWAVARLSQRFPK |
| | | AEFAEVSKLVTDLTKVHTECCHGDLLECADDRADLAKYICENQDSISSKLKECCE |
| | | KPLLEKSHCIAEVENDEMPADLPSLAADFVESKDVCKNYAEAKDVFLGMFLYEYA |
| | | RRHPDYSWLLLRLAKTYETTLEKCCAAADPHECYAKVFDEFKPLVEEPQNLIKQ |
| | | NCELFEQLGEYKFQNALLVRYTKKVPQVSTPTLVEVSRNLGKVGSKCCKHPEAK |
| | | RMPCAEDYLSVVLNQLCVLHEKTPVSDRVTKCCTESLVNRRPCFSALEVDETYV |
| | | PKEFNAETFTFHADICTLSEKERQIKKQTALVELVKHKPKATKEQLKAVMDDFAAF |
| | | VEKCCKADDKETCFAEEGKKLVAASQAALGLGGSGGSGGSGGSCSGPLGIEGG |
| | | IISNQQITASSTHRALFGLQKWYPYYARLNKKGLINAWTAAENDRWPWIQINLQR |
| | | KMRVTGVITQGAKRIGSPEYIKSYKIAYSNDGKTWAMYKVKGTNEDMVFRGNID |
| | | NNTPYANSFTPPIKAQYVRLYPQVCRRHCTLRMELLGCELSGCSEPLGMKSGHI |
| | | QDYQITASSIFRTLNMDMFTWEPRKARLDKQGKVNAWTSGHNDQSQWLQVDLL |
| | | VPTKVTGIITQGAKDFGHVQFVGSYKLAYSNDGEHWTVYQDEKQRKDKVFQGN |
| | | FDNDTHRKNVIDPPIYARHIRILPWSWYGRITLRSELLGC |
| 86 | EDIL3 EGF-like | NINECEVEPCKNGGICTDLVANYSCECPGEFMGRNCQYKGSDAHKSEVAHRFK |
| | domain | DLGEENFKALVLIAFAQYLQQSPFEDHVKLVNEVTEFAKTCVADESAENCDKSLH |
| | 3[EDIL3]-HSA- | TLFGDKLCTVATLRETYGEMADCCAKQEPERNECFLQHKDDNPNLPRLVRPEV |
| | C1-C2[EDIL3] | DVMCTAFHDNEETFLKKYLYEIARRHPYFYAPELLFFAKRYKAAFTECCQAADKA |
| | | ACLLPKLDELRDEGKASSAKQRLKCASLQKFGERAFKAWAVARLSQRFPKAEFA |
| | | EVSKLVTDLTKVHTECCHGDLLECADDRADLAKYICENQDSISSKLKECCEKPLL |
| | | EKSHCIAEVENDEMPADLPSLAADFVESKDVCKNYAEAKDVFLGMFLYEYARRH |
| | | PDYSVVLLLRLAKTYETTLEKCCAAADPHECYAKVFDEFKPLVEEPQNLIKQNCE |
| | | LFEQLGEYKFQNALLVRYTKKVPQVSTPTLVEVSRNLGKVGSKCCKHPEAKRMP |
| | | CAEDYLSVVLNQLCVLHEKTPVSDRVTKCCTESLVNRRPCFSALEVDETYVPKE |
| | | FNAETFTFHADICTLSEKERQIKKQTALVELVKHKPKATKEQLKAVMDDFAAFVEK |
| | | CCKADDKETCFAEEGKKLVAASQAALGLGGSGGSGGSGGSCSGPLGIEGGIISN |
| | | QQITASSTHRALFGLQKWYPYYARLNKKGLINAWTAAENDRWPWIQINLQRKMR |
| | | VTGVITQGAKRIGSPEYIKSYKIAYSNDGKTWAMYKVKGTNEDMVFRGNIDNNTP |
| | | YANSFTPPIKAQYVRLYPQVCRRHCTLRMELLGCELSGCSEPLGMKSGHIQDYQ |
| | | ITASSIFRTLNMDMFTWEPRKARLDKQGKVNAWTSGHNDQSQWLQVDLLVPTK |
| | | VTGIITQGAKDFGHVQFVGSYKLAYSNDGEHWTVYQDEKQRKDKVFQGNFDND |
| | | THRKNVIDPPIYARHIRILPWSWYGRITLRSELLGC |
| 87 | EDIL3 EGF-like | DICDPNPCENGGICLPGLADGSFSCECPDGFTDPNCSSWEVASDEEEPTSAGP |
| | domain 1- | CTPNPCHNGGTCEISEAYRGDTFIGYVCKCPRGFNGIHCQHGSDAHKSEVAHRF |
| | 2[EDIL3]-HSA- | KDLGEENFKALVLIAFAQYLQQSPFEDHVKLVNEVTEFAKTCVADESAENCDKSL |
| | C1-C2[EDIL3] | HTLFGDKLCTVATLRETYGEMADCCAKQEPERNECFLQHKDDNPNLPRLVRPE |
| | | VDVMCTAFHDNEETFLKKYLYEIARRHPYFYAPELLFFAKRYKAAFTECCQAADK |
| | | AACLLPKLDELRDEGKASSAKQRLKCASLQKFGERAFKAWAVARLSQRFPKAEF |
| | | AEVSKLVTDLTKVHTECCHGDLLECADDRADLAKYICENQDSISSKLKECCEKPL |
| | | LEKSHCIAEVENDEMPADLPSLAADFVESKDVCKNYAEAKDVFLGMFLYEYARR |
| | | HPDYSVVLLLRLAKTYETTLEKCCAAADPHECYAKVFDEFKPLVEEPQNLIKQNC |
| | | ELFEQLGEYKFQNALLVRYTKKVPQVSTPTLVEVSRNLGKVGSKCCKHPEAKRM |
| | | PCAEDYLSVVLNQLCVLHEKTPVSDRVTKCCTESLVNRRPCFSALEVDETYVPK |
| | | EFNAETFTFHADICTLSEKERQIKKQTALVELVKHKPKATKEQLKAVMDDFAAFVE |
| | | KCCKADDKETCFAEEGKKLVAASQAALGLGGSGGSGGSGGSCSGPLGIEGGIIS |
| | | NQQITASSTHRALFGLQKWYPYYARLNKKGLINAWTAAENDRWPWIQINLQRKM |
| | | RVTGVITQGAKRIGSPEYIKSYKIAYSNDGKTWAMYKVKGTNEDMVFRGNIDNNT |
| | | PYANSFTPPIKAQYVRLYPQVCRRHCTLRMELLGCELSGCSEPLGMKSGHIQDY |
| | | QITASSIFRTLNMDMFTWEPRKARLDKQGKVNAWTSGHNDQSQWLQVDLLVPT |
| | | KVTGIITQGAKDFGHVQFVGSYKLAYSNDGEHWTVYQDEKQRKDKVFQGNFDN |
| | | DTHRKNVIDPPIYARHIRILPWSWYGRITLRSELLGC |
| 88 | EDIL3 EGF-like | SAGPCTPNPCHNGGTCEISEAYRGDTFIGYVCKCPRGFNGIHCQHNINECEVEP |
| | domain 2- | CKNGGICTDLVANYSCECPGEFMGRNCQYKGSDAHKSEVAHRFKDLGEENFKA |
| | 3[EDIL3]-HSA- | LVLIAFAQYLQQSPFEDHVKLVNEVTEFAKTCVADESAENCDKSLHTLFGDKLCT |
| | C1-C2[EDIL3] | VATLRETYGEMADCCAKQEPERNECFLQHKDDNPNLPRLVRPEVDVMCTAFHD |
| | | NEETFLKKYLYEIARRHPYFYAPELLFFAKRYKAAFTECCQAADKAACLLPKLDEL |
| | | RDEGKASSAKQRLKCASLQKFGERAFKAWAVARLSQRFPKAEFAEVSKLVTDLT |
| | | KVHTECCHGDLLECADDRADLAKYICENQDSISSKLKECCEKPLLEKSHCIAEVE |
| | | NDEMPADLPSLAADFVESKDVCKNYAEAKDVFLGMFLYEYARRHPDYSVVLLLR |
| | | LAKTYETTLEKCCAAADPHECYAKVFDEFKPLVEEPQNLIKQNCELFEQLGEYKF |
| | | QNALLVRYTKKVPQVSTPTLVEVSRNLGKVGSKCCKHPEAKRMPCAEDYLSWL |
| | | NQLCVLHEKTPVSDRVTKCCTESLVNRRPCFSALEVDETYVPKEFNAETFTFHA |
| | | DICTLSEKERQIKKQTALVELVKHKPKATKEQLKAVMDDFAAFVEKCCKADDKET |
| | | CFAEEGKKLVAASQAALGLGGSGGSGGSGGSCSGPLGIEGGIISNQQITASSTH |
| | | RALFGLQKWYPYYARLNKKGLINAWTAAENDRWPWIQINLQRKMRVTGVITQGA |
| | | KRIGSPEYIKSYKIAYSNDGKTWAMYKVKGTNEDMVFRGNIDNNTPYANSFTPPI |
| | | KAQYVRLYPQVCRRHCTLRMELLGCELSGCSEPLGMKSGHIQDYQITASSIFRTL |
| | | NMDMFTWEPRKARLDKQGKVNAWTSGHNDQSQWLQVDLLVPTKVTGIITQGAK |
| | | DFGHVQFVGSYKLAYSNDGEHWTVYQDEKQRKDKVFQGNFDNDTHRKNVIDP |
| | | PIYARHIRILPWSWYGRITLRSELLGC |
| 89 | EDIL3 EGF-like | DICDPNPCENGGICLPGLADGSFSCECPDGFTDPNCSSVVEVASDEEEPTNINE |
| | domain 1- | CEVEPCKNGGICTDLVANYSCECPGEFMGRNCQYKGSDAHKSEVAHRFKDLGE |
| | 3[EDIL3]-HSA- | ENFKALVLIAFAQYLQQSPFEDHVKLVNEVTEFAKTCVADESAENCDKSLHTLFG |
| | C1-C2[EDIL3] | DKLCTVATLRETYGEMADCCAKQEPERNECFLQHKDDNPNLPRLVRPEVDVMC |
| | | TAFHDNEETFLKKYLYEIARRHPYFYAPELLFFAKRYKAAFTECCQAADKAACLLP |
| | | KLDELRDEGKASSAKQRLKCASLQKFGERAFKAWAVARLSQRFPKAEFAEVSKL |
| | | VTDLTKVHTECCHGDLLECADDRADLAKYICENQDSISSKLKECCEKPLLEKSHCI |
| | | AEVENDEMPADLPSLAADFVESKDVCKNYAEAKDVFLGMFLYEYARRHPDYSVV |
| | | LLLRLAKTYETTLEKCCAAADPHECYAKVFDEFKPLVEEPQNLIKQNCELFEQLG |
| | | EYKFQNALLVRYTKKVPQVSTPTLVEVSRNLGKVGSKCCKHPEAKRMPCAEDYL |
| | | SWLNQLCVLHEKTPVSDRVTKCCTESLVNRRPCFSALEVDETYVPKEFNAETFT |
| | | FHADICTLSEKERQIKKQTALVELVKHKPKATKEQLKAVMDDFAAFVEKCCKADD |
| | | KETCFAEEGKKLVAASQAALGLGGSGGSGGSGGSCSGPLGIEGGIISNQQITAS |
| | | STHRALFGLQKWYPYYARLNKKGLINAWTAAENDRWPWIQINLQRKMRVTGVIT |
| | | QGAKRIGSPEYIKSYKIAYSNDGKTWAMYKVKGTNEDMVFRGNIDNNTPYANSF |
| | | TPPIKAQYVRLYPQVCRRHCTLRMELLGCELSGCSEPLGMKSGHIQDYQITASSI |
| | | FRTLNMDMFTWEPRKARLDKQGKVNAWTSGHNDQSQWLQVDLLVPTKVTGIIT |
| | | QGAKDFGHVQFVGSYKLAYSNDGEHWTVYQDEKQRKDKVFQGNFDNDTHRKN |
| | | VIDPPIYARHIRILPWSWYGRITLRSELLGC |
| 13 | FP050 | gacatctgcgaccccaatccttgcgagaatggcggcatttgtctgcctggactggccgatggcagcttctcttgtga |
| | nucleic acid | atgccccgatggcttcacagaccccaattgcagctctgtggtggaagtggccagcgacgaggaagaacctaca |
| | | agcgctggcccctgcacacccaatccatgtcataatggcggaacctgcgagatcagcgaggcctacagaggcg |
| | | ataccttcatcggctacgtgtgcaagtgccccagaggcttcaatggcatccactgccagcacaacatcaacgagt |
| | | gcgaggtggaaccatgcaagaacggcggcatctgtaccgacctggtggccaattactcttgcgagtgccctggc |
| | | gagttcatgggcagaaactgccagtacaagggatccgacgctcacaagtctgaggtggcccacagattcaagg |
| | | acctgggcgaagagaacttcaaggccctggtgctgatcgccttcgctcagtatctgcagcagagccctttcgagg |
| | | accacgtgaagctggtcaacgaagtgaccgagttcgccaagacctgtgtggccgatgagagcgccgagaactg |
| | | tgacaagagcctgcacacactgttcggcgacaagctgtgtaccgtggccacactgagagaaacctacggcgag |
| | | atggccgactgctgtgccaagcaagagcccgagagaaacgagtgcttcctgcagcacaaggacgacaacccc |
| | | aacctgcctagactcgtgcgacccgaagtggatgtgatgtgcaccgcctttcacgacaacgaggaaaccttcctg |
| | | aagaagtacctgtacgagatcgccagacggcacccctacttttatgcccctgagctgctgttcttcgccaagcggta |
| | | taaggccgccttcaccgaatgttgccaggccgctgataaggctgcctgtctgctgcctaagctggacgagctgag |
| | | agatgagggcaaagccagctctgccaagcagagactgaagtgcgccagcctgcagaagttcggcgagagag |
| | | cttttaaggcctgggccgttgccagactgagccagagatttcctaaggccgagtttgccgaggtgtccaagctcgtg |
| | | accgatctgacaaaggtgcacaccgagtgctgtcacggcgatctgctggaatgtgccgacgatagagccgacct |
| | | ggccaagtatatctgcgagaaccaggacagcatcagcagcaagctgaaagagtgctgcgagaagcccctgct |
| | | ggaaaagtctcactgtatcgccgaggtcgagaacgacgagatgcctgctgatctgcctagcctggccgccgattt |
| | | cgtggaaagcaaggatgtgtgcaagaactacgccgaggccaaagatgtgtttctgggcatgtttctgtatgagtac |
| | | gcccgcagacaccccgactattctgtggttctgctgctgcggctggccaagacatacgagacaaccctggaaaa |
| | | atgctgcgccgctgccgatcctcacgagtgttatgccaaggtgttcgacgagttcaagccactggtggaagaacc |
| | | ccagaacctgatcaagcagaactgcgagctgttcgagcagctgggcgagtacaagttccagaatgccctgctcg |
| | | tgcggtacaccaagaaagtgcctcaggtgtccacacctacactggttgaggtgtcccggaatctgggcaaagtgg |
| | | gcagcaagtgttgcaagcaccctgaggccaagagaatgccttgcgccgaggattacctgagcgtggtgctgaat |
| | | cagctgtgcgtgctgcacgagaaaacccctgtgtccgacagagtgaccaagtgctgtaccgagagcctcgtgaa |
| | | cagaaggccttgctttagcgccctggaagtggacgagacatacgtgcccaaagagttcaacgccgagacattca |
| | | ccttccacgccgatatctgcaccctgtccgagaaagagcggcagatcaagaagcagacagccctggtcgagct |
| | | ggttaagcacaagcccaaggccaccaaagaacagctgaaggccgtgatggacgacttcgccgcctttgtcgag |
| | | aagtgctgcaaggccgacgacaaagagacatgcttcgccgaagagggcaagaaactggtggctgcctctcag |
| | | gctgctctcggacttggaggaagcggaggatctggcggttccggaggaagttgttctggccctcttggcatcgaag |
| | | gcggcatcatcagcaatcagcagatcaccgccagcagcacccacagagcactgtttggactgcagaaatggta |
| | | tccctactacgcccggctgaacaagaagggcctgattaacgcctggacagccgccgagaatgacagatggccc |
| | | tggattcagatcaacctgcagcggaagatgagagtgaccggcgttatcacacagggcgccaaaagaatcggc |
| | | agccccgagtacatcaagagctacaagatcgcctacagcaacgacggcaagacctgggccatgtacaaagtg |
| | | aagggcaccaacgaggacatggtgttccggggcaacatcgacaacaacaccccttacgccaacagcttcacc |
| | | cctcctatcaaggcccagtacgtgcggctgtaccctcaagtgtgcagaaggcactgtaccctgagaatggaactg |
| | | ctgggctgcgaactgtctggctgttctgagccactgggcatgaagtccggccacatccaggattaccagatcaca |
| | | gcctccagcatcttcagaaccctgaacatggatatgttcacctgggagccccggaaggccagactggataagca |
| | | gggaaaagtgaatgcctggaccagcggccacaacgaccagtctcaatggctgcaagtggacctgctggtgccc |
| | | accaaagtgaccggaatcattactcagggcgcaaaggacttcggccacgtgcagtttgtgggctcctacaagctg |
| | | gcctactccaacgatggcgagcactggacagtgtaccaggacgagaagcagcgcaaggataaggtgttccag |
| | | ggaaacttcgataacgatacccaccggaagaacgtgatcgaccctccaatctacgccagacacatcagaatcct |
| | | gccttggtcttggtacggcagaatcaccctgagatccgagctgctgggatgc |
| 90 | Nucleic acid of | gacatctgcgaccccaacccctgcgagaacggcggcatctgcctgcccggcctggccgacggcagcttcagct |
| | Seq ID NO: 84 | gcgagtgccccgacggcttcaccgaccccaactgcagcagcgtggtggaggtggccagcgacgaggaggag |
| | | cccaccggcagcgacgcccacaagagcgaggtggcccaccggttcaaggacctgggcgaggagaacttcaa |
| | | ggccctggtgctgatcgccttcgcccagtacctgcagcagagccccttcgaggaccacgtgaagctggtgaacg |
| | | aggtgaccgagttcgccaagacctgcgtggccgacgagagcgccgagaactgcgacaagagcctgcacacc |
| | | ctgttcggcgacaagctgtgcaccgtggccaccctgcgggagacctacggcgagatggccgactgctgcgcca |
| | | agcaggagcccgagcggaacgagtgcttcctgcagcacaaggacgacaaccccaacctgccccggctggtg |
| | | cggcccgaggtggacgtgatgtgcaccgccttccacgacaacgaggagaccttcctgaagaagtacctgtacg |
| | | agatcgcccggcggcacccctacttctacgcccccgagctgctgttcttcgccaagcggtacaaggccgccttca |
| | | ccgagtgctgccaggccgccgacaaggccgcctgcctgctgcccaagctggacgagctgcgggacgagggc |
| | | aaggccagcagcgccaagcagcggctgaagtgcgccagcctgcagaagttcggcgagcgggccttcaaggc |
| | | ctgggccgtggcccggctgagccagcggttccccaaggccgagttcgccgaggtgagcaagctggtgaccgac |
| | | ctgaccaaggtgcacaccgagtgctgccacggcgacctgctggagtgcgccgacgaccgggccgacctggcc |
| | | aagtacatctgcgagaaccaggacagcatcagcagcaagctgaaggagtgctgcgagaagcccctgctggag |
| | | aagagccactgcatcgccgaggtggagaacgacgagatgcccgccgacctgcccagcctggccgccgacttc |
| | | gtggagagcaaggacgtgtgcaagaactacgccgaggccaaggacgtgttcctgggcatgttcctgtacgagta |
| | | cgcccggcggcaccccgactacagcgtggtgctgctgctgcggctggccaagacctacgagaccaccctggag |
| | | aagtgctgcgccgccgccgacccccacgagtgctacgccaaggtgttcgacgagttcaagcccctggtggagg |
| | | agccccagaacctgatcaagcagaactgcgagctgttcgagcagctgggcgagtacaagttccagaacgccct |
| | | gctggtgcggtacaccaagaaggtgccccaggtgagcacccccaccctggtggaggtgagccggaacctggg |
| | | caaggtgggcagcaagtgctgcaagcaccccgaggccaagcggatgccctgcgccgaggactacctgagcgt |
| | | ggtgctgaaccagctgtgcgtgctgcacgagaagacccccgtgagcgaccgggtgaccaagtgctgcaccga |
| | | gagcctggtgaaccggcggccctgcttcagcgccctggaggtggacgagacctacgtgcccaaggagttcaac |
| | | gccgagaccttcaccttccacgccgacatctgcaccctgagcgagaaggagcggcagatcaagaagcagacc |
| | | gccctggtggagctggtgaagcacaagcccaaggccaccaaggagcagctgaaggccgtgatggacgacttc |
| | | gccgccttcgtggagaagtgctgcaaggccgacgacaaggagacctgcttcgccgaggagggcaagaagctg |
| | | gtggccgccagccaggccgccctgggcctgggcggcagcggcggcagcggcggcagcggcggcagctgca |
| | | gcggccccctgggcatcgagggcggcatcatcagcaaccagcagatcaccgccagcagcacccaccgggcc |
| | | ctgttcggcctgcagaagtggtacccctactacgcccggctgaacaagaagggcctgatcaacgcctggaccgc |
| | | cgccgagaacgaccggtggccctggatccagatcaacctgcagcggaagatgcgggtgaccggcgtgatcac |
| | | ccagggcgccaagcggatcggcagccccgagtacatcaagagctacaagatcgcctacagcaacgacggca |
| | | agacctgggccatgtacaaggtgaagggcaccaacgaggacatggtgttccggggcaacatcgacaacaaca |
| | | ccccctacgccaacagcttcaccccccccatcaaggcccagtacgtgcggctgtacccccaggtgtgccggcgg |
| | | cactgcaccctgcggatggagctgctgggctgcgagctgagcggctgcagcgagcccctgggcatgaagagc |
| | | ggccacatccaggactaccagatcaccgccagcagcatcttccggaccctgaacatggacatgttcacctggga |
| | | gccccggaaggcccggctggacaagcagggcaaggtgaacgcctggaccagcggccacaacgaccagag |
| | | ccagtggctgcaggtggacctgctggtgcccaccaaggtgaccggcatcatcacccagggcgccaaggacttc |
| | | ggccacgtgcagttcgtgggcagctacaagctggcctacagcaacgacggcgagcactggaccgtgtaccag |
| | | gacgagaagcagcggaaggacaaggtgttccagggcaacttcgacaacgacacccaccggaagaacgtgat |
| | | cgacccccccatctacgcccggcacatccggatcctgccctggagctggtacggccggatcaccctgcggagc |
| | | gagctgctgggctgc |
| 91 | Nucleic acid of | agcgccggcccctgcacccccaacccctgccacaacggcggcacctgcgagatcagcgaggcctaccgggg |
| | Seq ID NO: 85 | cgacaccttcatcggctacgtgtgcaagtgcccccggggcttcaacggcatccactgccagcacggcagcgacg |
| | | cccacaagagcgaggtggcccaccggttcaaggacctgggcgaggagaacttcaaggccctggtgctgatcg |
| | | ccttcgcccagtacctgcagcagagccccttcgaggaccacgtgaagctggtgaacgaggtgaccgagttcgcc |
| | | aagacctgcgtggccgacgagagcgccgagaactgcgacaagagcctgcacaccctgttcggcgacaagctg |
| | | tgcaccgtggccaccctgcgggagacctacggcgagatggccgactgctgcgccaagcaggagcccgagcg |
| | | gaacgagtgcttcctgcagcacaaggacgacaaccccaacctgccccggctggtgcggcccgaggtggacgt |
| | | gatgtgcaccgccttccacgacaacgaggagaccttcctgaagaagtacctgtacgagatcgcccggcggcac |
| | | ccctacttctacgcccccgagctgctgttcttcgccaagcggtacaaggccgccttcaccgagtgctgccaggccg |
| | | ccgacaaggccgcctgcctgctgcccaagctggacgagctgcgggacgagggcaaggccagcagcgccaa |
| | | gcagcggctgaagtgcgccagcctgcagaagttcggcgagcgggccttcaaggcctgggccgtggcccggctg |
| | | agccagcggttccccaaggccgagttcgccgaggtgagcaagctggtgaccgacctgaccaaggtgcacacc |
| | | gagtgctgccacggcgacctgctggagtgcgccgacgaccgggccgacctggccaagtacatctgcgagaac |
| | | caggacagcatcagcagcaagctgaaggagtgctgcgagaagcccctgctggagaagagccactgcatcgc |
| | | cgaggtggagaacgacgagatgcccgccgacctgcccagcctggccgccgacttcgtggagagcaaggacgt |
| | | gtgcaagaactacgccgaggccaaggacgtgttcctgggcatgttcctgtacgagtacgcccggcggcaccccg |
| | | actacagcgtggtgctgctgctgcggctggccaagacctacgagaccaccctggagaagtgctgcgccgccgc |
| | | cgacccccacgagtgctacgccaaggtgttcgacgagttcaagcccctggtggaggagccccagaacctgatc |
| | | aagcagaactgcgagctgttcgagcagctgggcgagtacaagttccagaacgccctgctggtgcggtacacca |
| | | agaaggtgccccaggtgagcacccccaccctggtggaggtgagccggaacctgggcaaggtgggcagcaag |
| | | tgctgcaagcaccccgaggccaagcggatgccctgcgccgaggactacctgagcgtggtgctgaaccagctgt |
| | | gcgtgctgcacgagaagacccccgtgagcgaccgggtgaccaagtgctgcaccgagagcctggtgaaccggc |
| | | ggccctgcttcagcgccctggaggtggacgagacctacgtgcccaaggagttcaacgccgagaccttcaccttc |
| | | cacgccgacatctgcaccctgagcgagaaggagcggcagatcaagaagcagaccgccctggtggagctggt |
| | | gaagcacaagcccaaggccaccaaggagcagctgaaggccgtgatggacgacttcgccgccttcgtggaga |
| | | agtgctgcaaggccgacgacaaggagacctgcttcgccgaggagggcaagaagctggtggccgccagccag |
| | | gccgccctgggcctgggcggcagcggcggcagcggcggcagcggcggcagctgcagcggccccctgggca |
| | | tcgagggcggcatcatcagcaaccagcagatcaccgccagcagcacccaccgggccctgttcggcctgcaga |
| | | agtggtacccctactacgcccggctgaacaagaagggcctgatcaacgcctggaccgccgccgagaacgacc |
| | | ggtggccctggatccagatcaacctgcagcggaagatgcgggtgaccggcgtgatcacccagggcgccaagc |
| | | ggatcggcagccccgagtacatcaagagctacaagatcgcctacagcaacgacggcaagacctgggccatgt |
| | | acaaggtgaagggcaccaacgaggacatggtgttccggggcaacatcgacaacaacaccccctacgccaac |
| | | agcttcaccccccccatcaaggcccagtacgtgcggctgtacccccaggtgtgccggcggcactgcaccctgcg |
| | | gatggagctgctgggctgcgagctgagcggctgcagcgagcccctgggcatgaagagcggccacatccagga |
| | | ctaccagatcaccgccagcagcatcttccggaccctgaacatggacatgttcacctgggagccccggaaggccc |
| | | ggctggacaagcagggcaaggtgaacgcctggaccagcggccacaacgaccagagccagtggctgcaggt |
| | | ggacctgctggtgcccaccaaggtgaccggcatcatcacccagggcgccaaggacttcggccacgtgcagttc |
| | | gtgggcagctacaagctggcctacagcaacgacggcgagcactggaccgtgtaccaggacgagaagcagcg |
| | | gaaggacaaggtgttccagggcaacttcgacaacgacacccaccggaagaacgtgatcgacccccccatcta |
| | | cgcccggcacatccggatcctgccctggagctggtacggccggatcaccctgcggagcgagctgctgggctgc |
| 92 | Nucleic acid of | aacatcaacgagtgcgaggtggagccctgcaagaacggcggcatctgcaccgacctggtggccaactacagc |
| | Seq ID NO: 86 | tgcgagtgccccggcgagttcatgggccggaactgccagtacaagggcagcgacgcccacaagagcgaggt |
| | | ggcccaccggttcaaggacctgggcgaggagaacttcaaggccctggtgctgatcgccttcgcccagtacctgc |
| | | agcagagccccttcgaggaccacgtgaagctggtgaacgaggtgaccgagttcgccaagacctgcgtggccg |
| | | acgagagcgccgagaactgcgacaagagcctgcacaccctgttcggcgacaagctgtgcaccgtggccaccc |
| | | tgcgggagacctacggcgagatggccgactgctgcgccaagcaggagcccgagcggaacgagtgcttcctgc |
| | | agcacaaggacgacaaccccaacctgccccggctggtgcggcccgaggtggacgtgatgtgcaccgccttcc |
| | | acgacaacgaggagaccttcctgaagaagtacctgtacgagatcgcccggcggcacccctacttctacgccccc |
| | | gagctgctgttcttcgccaagcggtacaaggccgccttcaccgagtgctgccaggccgccgacaaggccgcctg |
| | | cctgctgcccaagctggacgagctgcgggacgagggcaaggccagcagcgccaagcagcggctgaagtgc |
| | | gccagcctgcagaagttcggcgagcgggccttcaaggcctgggccgtggcccggctgagccagcggttcccca |
| | | aggccgagttcgccgaggtgagcaagctggtgaccgacctgaccaaggtgcacaccgagtgctgccacggcg |
| | | acctgctggagtgcgccgacgaccgggccgacctggccaagtacatctgcgagaaccaggacagcatcagca |
| | | gcaagctgaaggagtgctgcgagaagcccctgctggagaagagccactgcatcgccgaggtggagaacgac |
| | | gagatgcccgccgacctgcccagcctggccgccgacttcgtggagagcaaggacgtgtgcaagaactacgcc |
| | | gaggccaaggacgtgttcctgggcatgttcctgtacgagtacgcccggcggcaccccgactacagcgtggtgctg |
| | | ctgctgcggctggccaagacctacgagaccaccctggagaagtgctgcgccgccgccgacccccacgagtgct |
| | | acgccaaggtgttcgacgagttcaagcccctggtggaggagccccagaacctgatcaagcagaactgcgagct |
| | | gttcgagcagctgggcgagtacaagttccagaacgccctgctggtgcggtacaccaagaaggtgccccaggtg |
| | | agcacccccaccctggtggaggtgagccggaacctgggcaaggtgggcagcaagtgctgcaagcaccccga |
| | | ggccaagcggatgccctgcgccgaggactacctgagcgtggtgctgaaccagctgtgcgtgctgcacgagaag |
| | | acccccgtgagcgaccgggtgaccaagtgctgcaccgagagcctggtgaaccggcggccctgcttcagcgccc |
| | | tggaggtggacgagacctacgtgcccaaggagttcaacgccgagaccttcaccttccacgccgacatctgcacc |
| | | ctgagcgagaaggagcggcagatcaagaagcagaccgccctggtggagctggtgaagcacaagcccaagg |
| | | ccaccaaggagcagctgaaggccgtgatggacgacttcgccgccttcgtggagaagtgctgcaaggccgacg |
| | | acaaggagacctgcttcgccgaggagggcaagaagctggtggccgccagccaggccgccctgggcctgggc |
| | | ggcagcggcggcagcggcggcagcggcggcagctgcagcggccccctgggcatcgagggcggcatcatca |
| | | gcaaccagcagatcaccgccagcagcacccaccgggccctgttcggcctgcagaagtggtacccctactacgc |
| | | ccggctgaacaagaagggcctgatcaacgcctggaccgccgccgagaacgaccggtggccctggatccagat |
| | | caacctgcagcggaagatgcgggtgaccggcgtgatcacccagggcgccaagcggatcggcagccccgagt |
| | | acatcaagagctacaagatcgcctacagcaacgacggcaagacctgggccatgtacaaggtgaagggcacc |
| | | aacgaggacatggtgttccggggcaacatcgacaacaacaccccctacgccaacagcttcaccccccccatca |
| | | aggcccagtacgtgcggctgtacccccaggtgtgccggcggcactgcaccctgcggatggagctgctgggctgc |
| | | gagctgagcggctgcagcgagcccctgggcatgaagagcggccacatccaggactaccagatcaccgccag |
| | | cagcatcttccggaccctgaacatggacatgttcacctgggagccccggaaggcccggctggacaagcagggc |
| | | aaggtgaacgcctggaccagcggccacaacgaccagagccagtggctgcaggtggacctgctggtgcccacc |
| | | aaggtgaccggcatcatcacccagggcgccaaggacttcggccacgtgcagttcgtgggcagctacaagctgg |
| | | cctacagcaacgacggcgagcactggaccgtgtaccaggacgagaagcagcggaaggacaaggtgttccag |
| | | ggcaacttcgacaacgacacccaccggaagaacgtgatcgacccccccatctacgcccggcacatccggatc |
| | | ctgccctggagctggtacggccggatcaccctgcggagcgagctgctgggctgc |
| 93 | Nucleic acid of | gacatctgcgaccccaacccctgcgagaacggcggcatctgcctgcccggcctggccgacggcagcttcagct |
| | Seq ID NO: 87 | gcgagtgccccgacggcttcaccgaccccaactgcagcagcgtggtggaggtggccagcgacgaggaggag |
| | | cccaccagcgccggcccctgcacccccaacccctgccacaacggcggcacctgcgagatcagcgaggccta |
| | | ccggggcgacaccttcatcggctacgtgtgcaagtgcccccggggcttcaacggcatccactgccagcacggca |
| | | gcgacgcccacaagagcgaggtggcccaccggttcaaggacctgggcgaggagaacttcaaggccctggtg |
| | | ctgatcgccttcgcccagtacctgcagcagagccccttcgaggaccacgtgaagctggtgaacgaggtgaccga |
| | | gttcgccaagacctgcgtggccgacgagagcgccgagaactgcgacaagagcctgcacaccctgttcggcga |
| | | caagctgtgcaccgtggccaccctgcgggagacctacggcgagatggccgactgctgcgccaagcaggagcc |
| | | cgagcggaacgagtgcttcctgcagcacaaggacgacaaccccaacctgccccggctggtgcggcccgaggt |
| | | ggacgtgatgtgcaccgccttccacgacaacgaggagaccttcctgaagaagtacctgtacgagatcgcccggc |
| | | ggcacccctacttctacgcccccgagctgctgttcttcgccaagcggtacaaggccgccttcaccgagtgctgcca |
| | | ggccgccgacaaggccgcctgcctgctgcccaagctggacgagctgcgggacgagggcaaggccagcagc |
| | | gccaagcagcggctgaagtgcgccagcctgcagaagttcggcgagcgggccttcaaggcctgggccgtggcc |
| | | cggctgagccagcggttccccaaggccgagttcgccgaggtgagcaagctggtgaccgacctgaccaaggtgc |
| | | acaccgagtgctgccacggcgacctgctggagtgcgccgacgaccgggccgacctggccaagtacatctgcg |
| | | agaaccaggacagcatcagcagcaagctgaaggagtgctgcgagaagcccctgctggagaagagccactgc |
| | | atcgccgaggtggagaacgacgagatgcccgccgacctgcccagcctggccgccgacttcgtggagagcaag |
| | | gacgtgtgcaagaactacgccgaggccaaggacgtgttcctgggcatgttcctgtacgagtacgcccggcggca |
| | | ccccgactacagcgtggtgctgctgctgcggctggccaagacctacgagaccaccctggagaagtgctgcgcc |
| | | gccgccgacccccacgagtgctacgccaaggtgttcgacgagttcaagcccctggtggaggagccccagaac |
| | | ctgatcaagcagaactgcgagctgttcgagcagctgggcgagtacaagttccagaacgccctgctggtgcggta |
| | | caccaagaaggtgccccaggtgagcacccccaccctggtggaggtgagccggaacctgggcaaggtgggca |
| | | gcaagtgctgcaagcaccccgaggccaagcggatgccctgcgccgaggactacctgagcgtggtgctgaacc |
| | | agctgtgcgtgctgcacgagaagacccccgtgagcgaccgggtgaccaagtgctgcaccgagagcctggtga |
| | | accggcggccctgcttcagcgccctggaggtggacgagacctacgtgcccaaggagttcaacgccgagacctt |
| | | caccttccacgccgacatctgcaccctgagcgagaaggagcggcagatcaagaagcagaccgccctggtgga |
| | | gctggtgaagcacaagcccaaggccaccaaggagcagctgaaggccgtgatggacgacttcgccgccttcgt |
| | | ggagaagtgctgcaaggccgacgacaaggagacctgcttcgccgaggagggcaagaagctggtggccgcca |
| | | gccaggccgccctgggcctgggcggcagcggcggcagcggcggcagcggcggcagctgcagcggccccct |
| | | gggcatcgagggcggcatcatcagcaaccagcagatcaccgccagcagcacccaccgggccctgttcggcct |
| | | gcagaagtggtacccctactacgcccggctgaacaagaagggcctgatcaacgcctggaccgccgccgagaa |
| | | cgaccggtggccctggatccagatcaacctgcagcggaagatgcgggtgaccggcgtgatcacccagggcgc |
| | | caagcggatcggcagccccgagtacatcaagagctacaagatcgcctacagcaacgacggcaagacctggg |
| | | ccatgtacaaggtgaagggcaccaacgaggacatggtgttccggggcaacatcgacaacaacaccccctacg |
| | | ccaacagcttcaccccccccatcaaggcccagtacgtgcggctgtacccccaggtgtgccggcggcactgcacc |
| | | ctgcggatggagctgctgggctgcgagctgagcggctgcagcgagcccctgggcatgaagagcggccacatc |
| | | caggactaccagatcaccgccagcagcatcttccggaccctgaacatggacatgttcacctgggagccccgga |
| | | aggcccggctggacaagcagggcaaggtgaacgcctggaccagcggccacaacgaccagagccagtggct |
| | | gcaggtggacctgctggtgcccaccaaggtgaccggcatcatcacccagggcgccaaggacttcggccacgtg |
| | | cagttcgtgggcagctacaagctggcctacagcaacgacggcgagcactggaccgtgtaccaggacgagaag |
| | | cagcggaaggacaaggtgttccagggcaacttcgacaacgacacccaccggaagaacgtgatcgacccccc |
| | | catctacgcccggcacatccggatcctgccctggagctggtacggccggatcaccctgcggagcgagctgctgg |
| | | gctgc |
| 94 | Nucleic acid of | agcgccggcccctgcacccccaacccctgccacaacggcggcacctgcgagatcagcgaggcctaccgggg |
| | Seq ID NO: 88 | cgacaccttcatcggctacgtgtgcaagtgcccccggggcttcaacggcatccactgccagcacaacatcaacg |
| | | agtgcgaggtggagccctgcaagaacggcggcatctgcaccgacctggtggccaactacagctgcgagtgccc |
| | | cggcgagttcatgggccggaactgccagtacaagggcagcgacgcccacaagagcgaggtggcccaccggt |
| | | tcaaggacctgggcgaggagaacttcaaggccctggtgctgatcgccttcgcccagtacctgcagcagagcccc |
| | | ttcgaggaccacgtgaagctggtgaacgaggtgaccgagttcgccaagacctgcgtggccgacgagagcgcc |
| | | gagaactgcgacaagagcctgcacaccctgttcggcgacaagctgtgcaccgtggccaccctgcgggagacct |
| | | acggcgagatggccgactgctgcgccaagcaggagcccgagcggaacgagtgcttcctgcagcacaaggac |
| | | gacaaccccaacctgccccggctggtgcggcccgaggtggacgtgatgtgcaccgccttccacgacaacgag |
| | | gagaccttcctgaagaagtacctgtacgagatcgcccggcggcacccctacttctacgcccccgagctgctgttctt |
| | | cgccaagcggtacaaggccgccttcaccgagtgctgccaggccgccgacaaggccgcctgcctgctgcccaa |
| | | gctggacgagctgcgggacgagggcaaggccagcagcgccaagcagcggctgaagtgcgccagcctgcag |
| | | aagttcggcgagcgggccttcaaggcctgggccgtggcccggctgagccagcggttccccaaggccgagttcg |
| | | ccgaggtgagcaagctggtgaccgacctgaccaaggtgcacaccgagtgctgccacggcgacctgctggagt |
| | | gcgccgacgaccgggccgacctggccaagtacatctgcgagaaccaggacagcatcagcagcaagctgaag |
| | | gagtgctgcgagaagcccctgctggagaagagccactgcatcgccgaggtggagaacgacgagatgcccgc |
| | | cgacctgcccagcctggccgccgacttcgtggagagcaaggacgtgtgcaagaactacgccgaggccaagga |
| | | cgtgttcctgggcatgttcctgtacgagtacgcccggcggcaccccgactacagcgtggtgctgctgctgcggctg |
| | | gccaagacctacgagaccaccctggagaagtgctgcgccgccgccgacccccacgagtgctacgccaaggtg |
| | | ttcgacgagttcaagcccctggtggaggagccccagaacctgatcaagcagaactgcgagctgttcgagcagct |
| | | gggcgagtacaagttccagaacgccctgctggtgcggtacaccaagaaggtgccccaggtgagcacccccac |
| | | cctggtggaggtgagccggaacctgggcaaggtgggcagcaagtgctgcaagcaccccgaggccaagcgga |
| | | tgccctgcgccgaggactacctgagcgtggtgctgaaccagctgtgcgtgctgcacgagaagacccccgtgagc |
| | | gaccgggtgaccaagtgctgcaccgagagcctggtgaaccggcggccctgcttcagcgccctggaggtggacg |
| | | agacctacgtgcccaaggagttcaacgccgagaccttcaccttccacgccgacatctgcaccctgagcgagaa |
| | | ggagcggcagatcaagaagcagaccgccctggtggagctggtgaagcacaagcccaaggccaccaaggag |
| | | cagctgaaggccgtgatggacgacttcgccgccttcgtggagaagtgctgcaaggccgacgacaaggagacct |
| | | gcttcgccgaggagggcaagaagctggtggccgccagccaggccgccctgggcctgggcggcagcggcggc |
| | | agcggcggcagcggcggcagctgcagcggccccctgggcatcgagggcggcatcatcagcaaccagcagat |
| | | caccgccagcagcacccaccgggccctgttcggcctgcagaagtggtacccctactacgcccggctgaacaag |
| | | aagggcctgatcaacgcctggaccgccgccgagaacgaccggtggccctggatccagatcaacctgcagcgg |
| | | aagatgcgggtgaccggcgtgatcacccagggcgccaagcggatcggcagccccgagtacatcaagagcta |
| | | caagatcgcctacagcaacgacggcaagacctgggccatgtacaaggtgaagggcaccaacgaggacatgg |
| | | tgttccggggcaacatcgacaacaacaccccctacgccaacagcttcaccccccccatcaaggcccagtacgt |
| | | gcggctgtacccccaggtgtgccggcggcactgcaccctgcggatggagctgctgggctgcgagctgagcggct |
| | | gcagcgagcccctgggcatgaagagcggccacatccaggactaccagatcaccgccagcagcatcttccgga |
| | | ccctgaacatggacatgttcacctgggagccccggaaggcccggctggacaagcagggcaaggtgaacgcct |
| | | ggaccagcggccacaacgaccagagccagtggctgcaggtggacctgctggtgcccaccaaggtgaccggc |
| | | atcatcacccagggcgccaaggacttcggccacgtgcagttcgtgggcagctacaagctggcctacagcaacg |
| | | acggcgagcactggaccgtgtaccaggacgagaagcagcggaaggacaaggtgttccagggcaacttcgac |
| | | aacgacacccaccggaagaacgtgatcgacccccccatctacgcccggcacatccggatcctgccctggagct |
| | | ggtacggccggatcaccctgcggagcgagctgctgggctgc |
| 95 | Nucleic acid of | gacatctgcgaccccaacccctgcgagaacggcggcatctgcctgcccggcctggccgacggcagcttcagct |
| | Seq ID NO: 89 | gcgagtgccccgacggcttcaccgaccccaactgcagcagcgtggtggaggtggccagcgacgaggaggag |
| | | cccaccaacatcaacgagtgcgaggtggagccctgcaagaacggcggcatctgcaccgacctggtggccaac |
| | | tacagctgcgagtgccccggcgagttcatgggccggaactgccagtacaagggcagcgacgcccacaagagc |
| | | gaggtggcccaccggttcaaggacctgggcgaggagaacttcaaggccctggtgctgatcgccttcgcccagta |
| | | cctgcagcagagccccttcgaggaccacgtgaagctggtgaacgaggtgaccgagttcgccaagacctgcgtg |
| | | gccgacgagagcgccgagaactgcgacaagagcctgcacaccctgttcggcgacaagctgtgcaccgtggcc |
| | | accctgcgggagacctacggcgagatggccgactgctgcgccaagcaggagcccgagcggaacgagtgcttc |
| | | ctgcagcacaaggacgacaaccccaacctgccccggctggtgcggcccgaggtggacgtgatgtgcaccgcc |
| | | ttccacgacaacgaggagaccttcctgaagaagtacctgtacgagatcgcccggcggcacccctacttctacgc |
| | | ccccgagctgctgttcttcgccaagcggtacaaggccgccttcaccgagtgctgccaggccgccgacaaggccg |
| | | cctgcctgctgcccaagctggacgagctgcgggacgagggcaaggccagcagcgccaagcagcggctgaag |
| | | tgcgccagcctgcagaagttcggcgagcgggccttcaaggcctgggccgtggcccggctgagccagcggttcc |
| | | ccaaggccgagttcgccgaggtgagcaagctggtgaccgacctgaccaaggtgcacaccgagtgctgccacg |
| | | gcgacctgctggagtgcgccgacgaccgggccgacctggccaagtacatctgcgagaaccaggacagcatca |
| | | gcagcaagctgaaggagtgctgcgagaagcccctgctggagaagagccactgcatcgccgaggtggagaac |
| | | gacgagatgcccgccgacctgcccagcctggccgccgacttcgtggagagcaaggacgtgtgcaagaactac |
| | | gccgaggccaaggacgtgttcctgggcatgttcctgtacgagtacgcccggcggcaccccgactacagcgtggt |
| | | gctgctgctgcggctggccaagacctacgagaccaccctggagaagtgctgcgccgccgccgacccccacga |
| | | gtgctacgccaaggtgttcgacgagttcaagcccctggtggaggagccccagaacctgatcaagcagaactgc |
| | | gagctgttcgagcagctgggcgagtacaagttccagaacgccctgctggtgcggtacaccaagaaggtgcccc |
| | | aggtgagcacccccaccctggtggaggtgagccggaacctgggcaaggtgggcagcaagtgctgcaagcac |
| | | cccgaggccaagcggatgccctgcgccgaggactacctgagcgtggtgctgaaccagctgtgcgtgctgcacg |
| | | agaagacccccgtgagcgaccgggtgaccaagtgctgcaccgagagcctggtgaaccggcggccctgcttca |
| | | gcgccctggaggtggacgagacctacgtgcccaaggagttcaacgccgagaccttcaccttccacgccgacat |
| | | ctgcaccctgagcgagaaggagcggcagatcaagaagcagaccgccctggtggagctggtgaagcacaagc |
| | | ccaaggccaccaaggagcagctgaaggccgtgatggacgacttcgccgccttcgtggagaagtgctgcaagg |
| | | ccgacgacaaggagacctgcttcgccgaggagggcaagaagctggtggccgccagccaggccgccctgggc |
| | | ctgggcggcagcggcggcagcggcggcagcggcggcagctgcagcggccccctgggcatcgagggcggca |
| | | tcatcagcaaccagcagatcaccgccagcagcacccaccgggccctgttcggcctgcagaagtggtaccccta |
| | | ctacgcccggctgaacaagaagggcctgatcaacgcctggaccgccgccgagaacgaccggtggccctggat |
| | | ccagatcaacctgcagcggaagatgcgggtgaccggcgtgatcacccagggcgccaagcggatcggcagcc |
| | | ccgagtacatcaagagctacaagatcgcctacagcaacgacggcaagacctgggccatgtacaaggtgaagg |
| | | gcaccaacgaggacatggtgttccggggcaacatcgacaacaacaccccctacgccaacagcttcacccccc |
| | | ccatcaaggcccagtacgtgcggctgtacccccaggtgtgccggcggcactgcaccctgcggatggagctgctg |
| | | ggctgcgagctgagcggctgcagcgagcccctgggcatgaagagcggccacatccaggactaccagatcacc |
| | | gccagcagcatcttccggaccctgaacatggacatgttcacctgggagccccggaaggcccggctggacaagc |
| | | agggcaaggtgaacgcctggaccagcggccacaacgaccagagccagtggctgcaggtggacctgctggtg |
| | | cccaccaaggtgaccggcatcatcacccagggcgccaaggacttcggccacgtgcagttcgtgggcagctaca |
| | | agctggcctacagcaacgacggcgagcactggaccgtgtaccaggacgagaagcagcggaaggacaaggt |
| | | gttccagggcaacttcgacaacgacacccaccggaagaacgtgatcgacccccccatctacgcccggcacatc |
| | | cggatcctgccctggagctggtacggccggatcaccctgcggagcgagctgctgggctgc |
| 14 | FP060 | LDICSKNPCHNGGLCEEISQEVRGDVFPSYTCTCLKGYAGNHCETKCVEPLGME |
| | EGF-C1-C2-Fc | NGNIANSQIAASSVRVTFLGLQHWVPELARLNRAGMVNAWTPSSNDDNPWIQV |
| | [S354C, T366W] | NLLRRMWVTGVVTQGASRLASHEYLKAFKVAYSLNGHEFDFIHDVNKKHKEFVG |
| | | NWNKNAVHVNLFETPVEAQYVRLYPTSCHTACTLRFELLGCELNGCANPLGLKN |
| | | NSIPDKQITASSSYKTWGLHLFSWNPSYARLDKQGNFNAWVAGSYGNDQWLQV |
| | | DLGSSKEVTGIITQGARNFGSVQFVASYKVAYSNDSANWTEYQDPRTGSSKIFP |
| | | GNWDNHSHKKNLFETPILARYVRILPVAWHNRIALRLELLGCGGGGTDKTHTCP |
| | | PCPAPELLGGPSVFLFPPKPKDTLMISRTPEVTCVWDVSHEDPEVKFNWYVDG |
| | | VEVHNAKTKPREEQYNSTYRVVSVLTVLHQDWLNGKEYKCKVSNKALPAPIEKTI |
| | | SKAKGQPREPQVYTLPPCREEMTKNQVSLWCLVKGFYPSDIAVEWESNGQPEN |
| | | NYKTTPPVLDSDGSFFLYSKLTVDKSRWQQGNVFSCSVMHEALHNHYTQKSLS |
| | | LSPGK |
| 15 | FP060 | ctggacatctgcagcaagaacccctgccacaacggcggcctgtgcgaagagatcagccaggaagtgcgggg |
| | nucleic acid | cgacgtgttccccagctacacctgtacctgcctgaagggctacgccggcaaccactgcgagactaagtgcgtgg |
| | | aacccctgggcatggaaaacggcaatattgccaacagccagatcgccgccagctccgtgcgcgtgacctttctg |
| | | ggactgcagcactgggtgcccgagctggccagactgaacagagccggcatggtgaacgcctggacccccagc |
| | | agcaacgacgacaacccttggatccaggtgaacctgctgcggcggatgtgggtgacaggcgtggtgacacagg |
| | | gcgccagcagactggccagccacgagtacctgaaggcctttaaggtggcctacagcctgaacggccacgagtt |
| | | cgacttcatccacgacgtgaacaagaaacacaaagaatttgtgggcaactggaacaagaacgccgtgcacgtg |
| | | aacctgttcgagacacccgtggaagcccagtacgtgcggctgtaccccaccagctgccacaccgcctgcaccct |
| | | gagattcgagctgctgggctgcgagctgaacggctgcgccaaccccctgggcctgaagaacaacagcatcccc |
| | | gacaagcagatcaccgcctccagcagctacaagacctggggcctgcacctgttcagctggaaccccagctacg |
| | | cccggctggacaagcagggcaacttcaacgcctgggtggccggcagctacggcaacgaccagtggctgcagg |
| | | tggacctgggcagcagcaaagaagtgaccggcatcatcacccagggggccagaaacttcggcagcgtgcagt |
| | | tcgtggccagctacaaagtggcctactccaacgacagcgccaactggaccgagtaccaggacccccggaccg |
| | | gcagctccaagatcttccccggcaactgggacaaccacagccacaagaagaatctgttcgaaacccccatcct |
| | | ggccagatacgtgcggatcctgcccgtggcctggcacaaccggatcgccctgagactggaactgctgggatgtg |
| | | ggggaggcggtaccgacaagacccacacctgccccccctgcccagccccagagctgctgggcggaccctcc |
| | | gtgttcctgttcccccccaagcccaaggacaccctgatgatcagcaggacccccgaggtgacctgcgtggtggtg |
| | | gacgtgagccacgaggacccagaggtgaagttcaactggtacgtggacggcgtggaggtgcacaacgccaa |
| | | gaccaagcccagagaggagcagtacaacagcacctacagggtggtgtccgtgctgaccgtgctgcaccagga |
| | | ctggctgaacggcaaggaatacaagtgcaaggtctccaacaaggccctgccagcccccatcgaaaagaccat |
| | | cagcaaggccaagggccagccacgggagccccaggtgtacaccctgcccccctgccgggaggagatgacc |
| | | aagaaccaggtgtccctgtggtgtctggtgaagggcttctaccccagcgacatcgccgtggagtgggagagcaa |
| | | cggccagcccgagaacaactacaagaccacccccccagtgctggacagcgacggcagcttcttcctgtacagc |
| | | aagctgaccgtggacaagtccaggtggcagcagggcaacgtgttcagctgcagcgtgatgcacgaggccctgc |
| | | acaaccactacacccagaagagcctgagcctgtcccccggcaag |
| 16 | FP070 | LDICSKNPCHNGGLCEEISQEVRGDVFPSYTCTCLKGYAGNHCETKGSDKTHTC |
| | EGF-Fc-C1-C2 | PPCPAPELLGGPSVFLFPPKPKDTLMISRTPEVTRVVSDVSHEDPEVKFNWYVD |
| | | GVEVHNAKTKPREEQYNSTYRWSVLTVLHQDWLNGKEYKCKVSNKALPAPIEK |
| | | TISKAKGQPREPQVYTLPPSREEMTKNQVSLTCLVKGFYPSDIAVEWESNGQPE |
| | | NNYKTTPPVLDSDGSFFLYSKLTVDKSRWQQGNVFSCSVMHEALHNHYTQKSL |
| | | SLSPGKGGSGGSGGSGGSCVEPLGMENGNIANSQIAASSVRVTFLGLQHWVPE |
| | | LARLNRAGMVNAWTPSSNDDNPWIQVNLLRRMWVTGVVTQGASRLASHEYLK |
| | | AFKVAYSLNGHEFDFIHDVNKKHKEFVGNWNKNAVHVNLFETPVEAQYVRLYPT |
| | | SCHTACTLRFELLGCELNGCANPLGLKNNSIPDKQITASSSYKTWGLHLFSWNPS |
| | | YARLDKQGNFNAWVAGSYGNDQWLQVDLGSSKEVTGIITQGARNFGSVQFVAS |
| | | YKVAYSNDSANWTEYQDPRTGSSKIFPGNWDNHSHKKNLFETPILARYVRILPVA |
| | | WHNRIALRLELLGCGSHHHHHH |
| 17 | FP070 | ctggacatctgcagcaagaatccttgccacaacggcggcctgtgcgaagagatttctcaagaagtgcggggcga |
| | nucleic acid | cgttttccccagctacacctgtacatgtctgaagggctacgccggcaaccactgcgagacaaaaggatccgaca |
| | | agacccacacctgccccccctgcccagccccagagctgctgggcggaccctccgtgttcctgttcccccccaagc |
| | | ccaaggacaccctgatgatcagcaggacccccgaggtgacctgcgtggtggtggacgtgagccacgaggacc |
| | | cagaggtgaagttcaactggtacgtggacggcgtggaggtgcacaacgccaagaccaagcccagagaggag |
| | | cagtacaacagcacctacagggtggtgtccgtgctgaccgtgctgcaccaggactggctgaacggcaaggaat |
| | | acaagtgcaaggtctccaacaaggccctgccagcccccatcgaaaagaccatcagcaaggccaagggccag |
| | | ccacgggagccccaggtgtacaccctgcccccctcccgggaggagatgaccaagaaccaggtgtccctgacct |
| | | gtctggtgaagggcttctaccccagcgacatcgccgtggagtgggagagcaacggccagcccgagaacaact |
| | | acaagaccacccccccagtgctggacagcgacggcagcttcttcctgtacagcaagctgaccgtggacaagtc |
| | | caggtggcagcagggcaacgtgttcagctgcagcgtgatgcacgaggccctgcacaaccactacacccagaa |
| | | gagcctgagcctgtcccccggcaagggaggaagcggaggatctggcggttccggaggctcttgtgtggaaccc |
| | | ctcggcatggaaaacggcaatatcgccaatagccagattgccgccagcagcgtcagagtgacatttctgggact |
| | | gcagcactgggtgcccgagctggctagactgaatagagccggcatggtcaacgcctggacacccagcagcaa |
| | | cgacgataacccttggattcaagtgaacctgctgcggcgtatgtgggtcacaggtgttgttacacagggcgcctcta |
| | | gactggccagccacgagtatctgaaggcctttaaggtggcctacagcctgaacggccacgagttcgacttcatcc |
| | | acgacgtgaacaagaagcacaaagagtttgtcggcaactggaacaagaacgccgtgcacgtgaacctgttcg |
| | | agacacctgtggaagcccagtacgtgcggctgtaccctacaagctgtcacaccgcctgcactctgagattcgaac |
| | | tgctgggatgcgagctgaacggctgtgctaatcctctgggcctgaagaacaacagcatccccgataagcagatc |
| | | accgccagctccagctataagacatggggcctgcacctgttcagctggaacccttcttacgccagactggacaag |
| | | cagggcaacttcaatgcttgggtggccggcagctacggcaatgatcagtggctgcaagtggacctgggcagcag |
| | | caaagaagtgacaggcatcatcacccagggcgccagaaatttcggcagcgtgcagtttgtggccagctacaaa |
| | | gtggcctactccaacgacagcgccaactggaccgagtatcaggaccctagaaccggcagctccaagatcttcc |
| | | ccggcaattgggacaaccacagccacaagaagaatctgttcgaaacccctatcctggccagatatgtgcgcattc |
| | | tgcccgtggcctggcacaacagaattgccctgagactggaactgctcggctgtggctctcaccaccaccatcacc |
| | | at |
| 18 | FP071 | LDICSKNPCHNGGLCEEISQEVRGDVFPSYTCTCLKGYAGNHCETKGSDKTHTC |
| | EGF-Fc(knob)- | PPCPAPELLGGPSVFLFPPKPKDTLMISRTPEVTRVVSDVSHEDPEVKFNWYVD |
| | C1-C2 | GVEVHNAKTKPREEQYNSTYRVVSVLTVLHQDWLNGKEYKCKVSNKALPAPIEK |
| | | TISKAKGQPREPQVYTLPPCREEMTKNQVSLWCLVKGFYPSDIAVEWESNGQP |
| | | ENNYKTTPPVLDSDGSFFLYSKLTVDKSRWQQGNVFSCSVMHEALHNHYTQKS |
| | | LSLSPGKGGSGGSGGSGGSCVEPLGMENGNIANSQIAASSVRVTFLGLQHWVP |
| | | ELARLNRAGMVNAWTPSSNDDNPWIQVNLLRRMWWVTGVVTQGASRLASHEYL |
| | | KAFKVAYSLNGHEFDFIHDVNKKHKEFVGNWNKNAVHVNLFETPVEAQYVRLYP |
| | | TSCHTACTLRFELLGCELNGCANPLGLKNNSIPDKQITASSSYKTWGLHLFSWNP |
| | | SYARLDKQGNFNAWVAGSYGNDQWLQVDLGSSKEVTGIITQGARNFGSVQFVA |
| | | SYKVAYSNDSANWTEYQDPRTGSSKIFPGNWDNHSHKKNLFETPILARYVRILPV |
| | | AWHNRIALRLELLGCGSHHHHHH |
| 19 | FP071 | ctggacatctgcagcaagaatccttgccacaacggcggcctgtgcgaagagatttctcaagaagtgcggg |
| | nucleic acid | gcgacgttttccccagctacacctgtacatgtctgaagggctacgccggcaaccactgcgagacaaaagg |
| | | atccgacaagacccacacctgccccccctgcccagccccagagctgctgggcggaccctccgtgttcctgt |
| | | tcccccccaagcccaaggacaccctgatgatcagcaggacccccgaggtgacctgcgtggtggtggacgt |
| | | gagccacgaggacccagaggtgaagttcaactggtacgtggacggcgtggaggtgcacaacgccaaga |
| | | ccaagcccagagaggagcagtacaacagcacctacagggtggtgtccgtgctgaccgtgctgcaccagg |
| | | actggctgaacggcaaggaatacaagtgcaaggtctccaacaaggccctgccagcccccatcgaaaag |
| | | accatcagcaaggccaagggccagccacgggagccccaggtgtacaccctgcccccctgccgggagg |
| | | agatgaccaagaaccaggtgtccctgtggtgtctggtgaagggcttctaccccagcgacatcgccgtggagt |
| | | gggagagcaacggccagcccgagaacaactacaagaccacccccccagtgctggacagcgacggca |
| | | gcttcttcctgtacagcaagctgaccgtggacaagtccaggtggcagcagggcaacgtgttcagctgcagc |
| | | gtgatgcacgaggccctgcacaaccactacacccagaagagcctgagcctgtcccccggcaagggagg |
| | | aagcggaggatctggcggttccggaggctcttgtgtggaacccctcggcatggaaaacggcaatatcgcc |
| | | aatagccagattgccgccagcagcgtcagagtgacatttctgggactgcagcactgggtgcccgagctggc |
| | | tagactgaatagagccggcatggtcaacgcctggacacccagcagcaacgacgataacccttggattcaa |
| | | gtgaacctgctgcggcgtatgtgggtcacaggtgttgttacacagggcgcctctagactggccagccacgag |
| | | tatctgaaggcctttaaggtggcctacagcctgaacggccacgagttcgacttcatccacgacgtgaacaag |
| | | aagcacaaagagtttgtcggcaactggaacaagaacgccgtgcacgtgaacctgttcgagacacctgtgg |
| | | aagcccagtacgtgcggctgtaccctacaagctgtcacaccgcctgcactctgagattcgaactgctgggat |
| | | gcgagctgaacggctgtgctaatcctctgggcctgaagaacaacagcatccccgataagcagatcaccgc |
| | | cagctccagctataagacatggggcctgcacctgttcagctggaacccttcttacgccagactggacaagc |
| | | agggcaacttcaatgcttgggtggccggcagctacggcaatgatcagtggctgcaagtggacctgggcag |
| | | cagcaaagaagtgacaggcatcatcacccagggcgccagaaatttcggcagcgtgcagtttgtggccagc |
| | | tacaaagtggcctactccaacgacagcgccaactggaccgagtatcaggaccctagaaccggcagctcc |
| | | aagatcttccccggcaattgggacaaccacagccacaagaagaatctgttcgaaacccctatcctggcca |
| | | gatatgtgcgcattctgcccgtggcctggcacaacagaattgccctgagactggaactgctcggctgtggctc |
| | | tcaccaccaccatcaccat |
| 20 | FP072 | LDICSKNPCHNGGLCEEISQEVRGDVFPSYTCTCLKGYAGNHCETKGSDKT |
| | EGF-Fc(hole)- | HTCPPCPAPELLGGPSVFLFPPKPKDTLMISRTPEVTRVVSDVSHEDPEVKF |
| | C1-C2 | NWYVDGVEVHNAKTKPREEQYNSTYRVVSVLTVLHQDWLNGKEYKCKVSN |
| | | KALPAPIEKTISKAKGQPREPQVCTLPPSREEMTKNQVSLSCAVKGFYPSDIA |
| | | VEWESNGQPENNYKTTPPVLDSDGSFFLVSKLTVDKSRWQQGNVFSCSVM |
| | | HEALHNHYTQKSLSLSPGKGGSGGSGGSGGSCVEPLGMENGNIANSQIAAS |
| | | SVRVTFLGLQHVWPELARLNRAGMVNAWTPSSNDDNPWIQVNLLRRMWVT |
| | | GVVTQGASRLASHEYLKAFKVAYSLNGHEFDFIHDVNKKHKEFVGNWNKNA |
| | | VHVNLFETPVEAQYVRLYPTSCHTACTLRFELLGCELNGCANPLGLKNNSIP |
| | | DKQITASSSYKTWG LH LFSWN PSYARLDKQG N FNAVWAGSYG N DQWLQV |
| | | DLGSSKEVTGIITQGARNFGSVQFVASYKVAYSNDSANWTEYQDPRTGSSKI |
| | | FPGNWDNHSHKKNLFETPILARYVRILPVAWHNRIALRLELLGCGSHHHHHH |
| 21 | FP072 | ctggacatctgcagcaagaatccttgccacaacggcggcctgtgcgaagagatttctcaagaagtgcggg |
| | nucleic acid | gcgacgttttccccagctacacctgtacatgtctgaagggctacgccggcaaccactgcgagacaaaagg |
| | | atccgacaagacccacacctgccccccctgcccagccccagagctgctgggcggaccctccgtgttcctgt |
| | | tcccccccaagcccaaggacaccctgatgatcagcaggacccccgaggtgacctgcgtggtggtggacgt |
| | | gagccacgaggacccagaggtgaagttcaactggtacgtggacggcgtggaggtgcacaacgccaaga |
| | | ccaagcccagagaggagcagtacaacagcacctacagggtggtgtccgtgctgaccgtgctgcaccagg |
| | | actggctgaacggcaaggaatacaagtgcaaggtctccaacaaggccctgccagcccccatcgaaaag |
| | | accatcagcaaggccaagggccagccacgggagccccaggtgtgcaccctgcccccctcccgggagg |
| | | agatgaccaagaaccaggtgtccctgtcctgtgcggtgaagggcttctaccccagcgacatcgccgtggag |
| | | tgggagagcaacggccagcccgagaacaactacaagaccacccccccagtgctggacagcgacggca |
| | | gcttcttcctggtcagcaagctgaccgtggacaagtccaggtggcagcagggcaacgtgttcagctgcagc |
| | | gtgatgcacgaggccctgcacaaccactacacccagaagagcctgagcctgtcccccggcaagggagg |
| | | aagcggaggatctggcggttccggaggctcttgtgtggaacccctcggcatggaaaacggcaatatcgcc |
| | | aatagccagattgccgccagcagcgtcagagtgacatttctgggactgcagcactgggtgcccgagctggc |
| | | tagactgaatagagccggcatggtcaacgcctggacacccagcagcaacgacgataacccttggattcaa |
| | | gtgaacctgctgcggcgtatgtgggtcacaggtgttgttacacagggcgcctctagactggccagccacgag |
| | | tatctgaaggcctttaaggtggcctacagcctgaacggccacgagttcgacttcatccacgacgtgaacaag |
| | | aagcacaaagagtttgtcggcaactggaacaagaacgccgtgcacgtgaacctgttcgagacacctgtgg |
| | | aagcccagtacgtgcggctgtaccctacaagctgtcacaccgcctgcactctgagattcgaactgctgggat |
| | | gcgagctgaacggctgtgctaatcctctgggcctgaagaacaacagcatccccgataagcagatcaccgc |
| | | cagctccagctataagacatggggcctgcacctgttcagctggaacccttcttacgccagactggacaagc |
| | | agggcaacttcaatgcttgggtggccggcagctacggcaatgatcagtggctgcaagtggacctgggcag |
| | | cagcaaagaagtgacaggcatcatcacccagggcgccagaaatttcggcagcgtgcagtttgtggccagc |
| | | tacaaagtggcctactccaacgacagcgccaactggaccgagtatcaggaccctagaaccggcagctcc |
| | | aagatcttccccggcaattgggacaaccacagccacaagaagaatctgttcgaaacccctatcctggcca |
| | | gatatgtgcgcattctgcccgtggcctggcacaacagaattgccctgagactggaactgctcggctgtggctc |
| | | tcaccaccaccatcaccat |
| 22 | FP080 | LDICSKNPCHNGGLCEEISQEVRGDVFPSYTCTCLKGYAGNHCETKCVEPLGME |
| | EGF-C1-C2-Fc | NGNIANSQIAASSVRVTFLGLQHWVPELARLNRAGMVNAWTPSSNDDNPWIQV |
| | | NLLRRMWVTGVVTQGASRLASHEYLKAFKVAYSLNGHEFDFIHDVNKKHKEFVG |
| | | NWNKNAVHVNLFETPVEAQYVRLYPTSCHTACTLRFELLGCELNGCANPLGLKN |
| | | NSIPDKQITASSSYKTWGLHLFSWNPSYARLDKQGNFNAWVAGSYGNDQWLQV |
| | | DLGSSKEVTGIITQGARNFGSVQFVASYKVAYSNDSANWTEYQDPRTGSSKIFP |
| | | GNWDNHSHKKNLFETPILARYVRILPVAWHNRIALRLELLGCGGGGTDKTHTCP |
| | | PCPAPELLGGPSVFLFPPKPKDTLMISRTPEVTRVVSDVSHEDPEVKFNWYVDG |
| | | VEVHNAKTKPREEQYNSTYRVVSVLTVLHQDWLNGKEYKCKVSNKALPAPIEKTI |
| | | SKAKGQPREPQVYTLPPSREEMTKNQVSLTCLVKGFYPSDIAVEWESNGQPEN |
| | | NYKTTPPVLDSDGSFFLYSKLTVDKSRWQQGNVFSCSVMHEALHNHYTQKSLS |
| | | LSPGK |
| 23 | FP080 | ctggacatctgcagcaagaacccctgccacaacggcggcctgtgcgaagagatcagccaggaagtgcgggg |
| | nucleic acid | cgacgtgttccccagctacacctgtacctgcctgaagggctacgccggcaaccactgcgagactaagtgcgtgg |
| | | aacccctgggcatggaaaacggcaatatcgccaacagccagatcgccgccagctccgtgcgcgtgacctttctg |
| | | ggactgcagcactgggtgcccgagctggccagactgaacagagccggcatggtgaacgcctggacccccagc |
| | | agcaacgacgacaacccttggatccaggtgaacctgctgcggcggatgtgggtgacaggcgtggtgacacagg |
| | | gcgccagcagactggccagccacgagtacctgaaggcctttaaggtggcctacagcctgaacggccacgagtt |
| | | cgacttcatccacgacgtgaacaagaaacacaaagaatttgtgggcaactggaacaagaacgccgtgcacgtg |
| | | aacctgttcgagacacccgtggaagcccagtacgtgcggctgtaccccaccagctgccacaccgcctgcaccct |
| | | gagattcgagctgctgggctgcgagctgaacggctgcgccaaccccctgggcctgaagaacaacagcatcccc |
| | | gacaagcagatcaccgcctccagcagctacaagacctggggcctgcacctgttcagctggaaccccagctacg |
| | | cccggctggacaagcagggcaacttcaacgcctgggtggccggcagctacggcaacgaccagtggctgcagg |
| | | tggacctgggcagcagcaaagaagtgaccggcatcatcacccagggggccagaaacttcggcagcgtgcagt |
| | | tcgtggccagctacaaagtggcctactccaacgacagcgccaactggaccgagtaccaggacccccggaccg |
| | | gcagctccaagatcttccccggcaactgggacaaccacagccacaagaagaatctgttcgaaacccccatcct |
| | | ggccagatacgtgcggatcctgcccgtggcctggcacaaccggatcgccctgagactggaactgctgggatgtg |
| | | ggggaggcggtaccgacaagacccacacctgccccccctgcccagccccagagctgctgggcggaccctcc |
| | | gtgttcctgttcccccccaagcccaaggacaccctgatgatcagcaggacccccgaggtgacctgcgtggtggtg |
| | | gacgtgagccacgaggacccagaggtgaagttcaactggtacgtggacggcgtggaggtgcacaacgccaa |
| | | gaccaagcccagagaggagcagtacaacagcacctacagggtggtgtccgtgctgaccgtgctgcaccagga |
| | | ctggctgaacggcaaggaatacaagtgcaaggtctccaacaaggccctgccagcccccatcgaaaagaccat |
| | | cagcaaggccaagggccagccacgggagccccaggtgtacaccctgcccccctcccgggaggagatgacca |
| | | agaaccaggtgtccctgacctgtctggtgaagggcttctaccccagcgacatcgccgtggagtgggagagcaac |
| | | ggccagcccgagaacaactacaagaccacccccccagtgctggacagcgacggcagcttcttcctgtacagca |
| | | agctgaccgtggacaagtccaggtggcagcagggcaacgtgttcagctgcagcgtgatgcacgaggccctgca |
| | | caaccactacacccagaagagcctgagcctgtcccccggcaag |
| 24 | FP090 | DKTHTCPPCPAPELLGGPSVFLFPPKPKDTLMISRTPEVTRVVSDVSHEDPEVKF |
| | Fc-EGF-C1-C2 | NWYVDGVEVHNAKTKPREEQYNSTYRWSVLTVLHQDWLNGKEYKCKVSNKAL |
| | | PAPIEKTISKAKGQPREPQVYTLPPSREEMTKNQVSLTCLVKGFYPSDIAVEWES |
| | | NGQPENNYKTTPPVLDSDGSFFLYSKLTVDKSRWQQGNVFSCSVMHEALHNHY |
| | | TQKSLSLSPGKGSLEVLFQGPGSSLDICSKNPCHNGGLCEEISQEVRGDVFPSY |
| | | TCTCLKGYAGNHCETKCVEPLGMENGNIANSQIAASSVRVTFLGLQHWVPELAR |
| | | LNRAGMVNAWTPSSNDDNPWIQVNLLRRMWVTGVVTQGASRLASHEYLKAFK |
| | | VAYSLNGHEFDFIHDVNKKHKEFVGNWNKNAVHVNLFETPVEAQYVRLYPTSCH |
| | | TACTLRFELLGCELNGCANPLGLKNNSIPDKQITASSSYKTWGLHLFSWNPSYAR |
| | | LDKQGNFNAWVAGSYGNDQWLQVDLGSSKEVTGIITQGARNFGSVQFVASYKV |
| | | AYSNDSANWTEYQDPRTGSSKIFPGNWDNHSHKKNLFETPILARYVRILPVAWH |
| | | NRIALRLELLGC |
| 25 | FP090 | gacaagacccacacctgtcccccctgccctgctcctgagctgctgggaggacccagcgtgttcctgttccccccca |
| | nucleic acid | agcccaaggacaccctgatgatcagccggacccccgaagtgacctgcgtggtggtggacgtgtcccacgagga |
| | | ccctgaagtgaagttcaattggtacgtggacggcgtggaggtgcacaacgccaagaccaagccccgggagga |
| | | acagtacaacagcacctaccgggtggtgtccgtgctgaccgtgctgcaccaggactggctgaacggcaaagaa |
| | | tacaagtgcaaggtgtccaacaaggccctgcctgcccccatcgagaaaaccatcagcaaggccaagggccag |
| | | cccagagaaccccaggtgtacacactcccaccaagccgggaggaaatgaccaagaaccaggtgtccctgac |
| | | ctgcctggtgaagggcttctaccccagcgacattgccgtggagtgggagagcaacggccagcctgagaacaac |
| | | tacaagaccacccctccagtcctcgattctgatggatctttcttcctgtactccaagctgaccgtggacaagagccg |
| | | gtggcagcagggaaacgtcttttcctgttccgtcatgcatgaggctctccacaatcactacacccagaagtccctga |
| | | gcctgagccccggcaagggatccctcgaggtgctgtttcagggaccaggcagcagcctggacatctgcagcaa |
| | | gaacccctgccacaacggcggcctgtgcgaagagatcagccaggaagtgcggggcgacgtgttccccagcta |
| | | cacctgtacctgcctgaagggctacgccggcaaccactgcgagactaagtgcgtggaacccctgggaatggaa |
| | | aacggcaatatcgccaacagccagatcgccgccagctccgtcagagtgacctttctgggactccagcactgggt |
| | | gcccgagctggccagactgaatagagccggcatggtcaacgcctggacccccagcagcaacgacgacaacc |
| | | cctggattcaagtgaacctgctgcggcgtatgtgggtcaccggcgtcgtgacacagggcgctagcagactggcc |
| | | agccacgagtacctgaaggcctttaaggtggcctacagcctgaacggccacgagttcgacttcatccacgacgtg |
| | | aacaagaaacacaaagaatttgtgggcaactggaacaagaacgccgtgcacgtgaacctgttcgagacaccc |
| | | gtggaagcccagtacgtgcggctgtaccctaccagctgtcacaccgcctgcaccttaagattcgagctgctgggct |
| | | gcgagctgaacggctgcgctaatcctctgggcctgaagaacaacagcatccccgacaagcagatcaccgcctc |
| | | cagcagctacaagacctggggactgcacctgttcagctggaaccctagctacgcccggctggacaagcagggc |
| | | aacttcaatgcttgggtggccggcagctacggcaacgaccagtggctccaggtggacctgggcagcagcaaag |
| | | aagtgaccggcatcatcacccagggggccagaaacttcggcagcgtgcagttcgtggcctcctacaaagtggcc |
| | | tactccaacgacagcgccaactggaccgagtaccaggaccctagaaccggcagctccaagattttccccggca |
| | | actgggataaccacagccacaagaagaatctgttcgaaacccccatcctggcccgctacgtgcgcattctaccg |
| | | gtcgcctggcacaaccggatcgccctgagactggaactgctgggatgc |
| 26 | FP100 | LDICSKNPCHNGGLCEEISQEVRGDVFPSYTCTCLKGYAGNHCETKGCANP |
| | EGF-C2-C2 | LGLKNNSIPDKQITASSSYKTWGLHLFSWNPSYARLDKQGNFNAWVAGSYG |
| | | NDQWLQVDLGSSKEVTGIITQGARNFGSVQFVASYKVAYSNDSANWTEYQD |
| | | PRTGSSKIFPGNWDNHSHKKNLFETPILARYVRILPVAWHNRIALRLELLGCG |
| | | CANPLGLKNNSIPDKQITASSSYKTWGLHLFSWNPSYARLDKQGNFNAVWA |
| | | GSYGNDQWLQVDLGSSKEVTGIITQGARNFGSVQFVASYKVAYSNDSANW |
| | | TEYQDPRTGSSKIFPGNWDNHSHKKNLFETPILARYVRILPVAWHNRIALRLE |
| | | LLGC |
| 27 | FP100 | ctggacatctgcagcaagaacccctgccacaacggcggcctgtgcgaagagatcagccaggaagtgcg |
| | nucleic acid | gggcgacgtgttccccagctacacctgtacctgcctgaagggctacgccggcaaccactgcgagacaaag |
| | | ggctgcgccaaccccctgggcctgaagaacaacagcatccccgacaagcagatcaccgccagcagca |
| | | gctacaagacctggggcctgcacctgttcagctggaaccccagctacgcccggctggacaagcagggca |
| | | acttcaacgcctgggtggccggcagctacggcaacgaccagtggctgcaggtggacctgggcagcagca |
| | | aagaagtgaccggcatcatcacccagggcgccagaaacttcggcagcgtgcagttcgtggccagctaca |
| | | aggtggcctacagcaacgacagcgccaactggaccgagtaccaggacccccggaccggcagctccaa |
| | | gatcttccccggcaactgggacaaccacagccacaagaagaacctgttcgagacacccatcctggccag |
| | | atacgtgcggatcctgcccgtggcctggcacaaccggatcgccctgagactggaactgctgggctgcggct |
| | | gtgccaatcctctgggactgaaaaacaattccatccctgataagcagattacagcctccagctcctataaga |
| | | catgggggctgcatctgttttcttggaacccctcctacgctagactggataagcagggaaatttcaatgcttgg |
| | | gtggccgggtcctatggaaatgatcagtggctgcaggtggacctgggatcctccaaagaagtgacagggat |
| | | tattacacagggggctcggaactttggctctgtgcagtttgtggcttcctacaaagtggcttactccaacgattcc |
| | | gccaattggacagaatatcaggatcccagaaccggctccagcaagatctttcctggaaattgggataatca |
| | | ctcccacaagaaaaatctgtttgaaacccctattctggctcgctatgtgcgcattctgcctgtggcttggcataat |
| | | agaatcgctctgcggctggaactgctgggatgc |
| 28 | FP110 | LDICSKNPCHNGGLCEEISQEVRGDVFPSYTCTCLKGYAGNHCETKCVEPLGME |
| | EGF-C1-C2- | NGNIANSQIAASSVRVTFLGLQHWVPELARLNRAGMVNAWTPSSNDDNPWIQV |
| | HSA | NLLRRMWVTGVVTQGASRLASHEYLKAFKVAYSLNGHEFDFIHDVNKKHKEFVG |
| | | NWNKNAVHVNLFETPVEAQYVRLYPTSCHTACTLRFELLGCELNGCANPLGLKN |
| | | NSIPDKQITASSSYKTWGLHLFSWNPSYARLDKQGNFNAWVAGSYGNDQWLQV |
| | | DLGSSKEVTGIITQGARNFGSVQFVASYKVAYSNDSANWTEYQDPRTGSSKIFP |
| | | GNWDNHSHKKNLFETPILARYVRILPVAWHNRIALRLELLGCGGSGGSGGSGGS |
| | | DAHKSEVAHRFKDLGEENFKALVLIAFAQYLQQSPFEDHVKLVNEVTEFAKTCVA |
| | | DESAENCDKSLHTLFGDKLCTVATLRETYGEMADCCAKQEPERNECFLQHKDD |
| | | NPNLPRLVRPEVDVMCTAFHDNEETFLKKYLYEIARRHPYFYAPELLFFAKRYKA |
| | | AFTECCQAADKAACLLPKLDELRDEGKASSAKQRLKCASLQKFGERAFKAWAVA |
| | | RLSQRFPKAEFAEVSKLVTDLTKVHTECCHGDLLECADDRADLAKYICENQDSIS |
| | | SKLKECCEKPLLEKSHCIAEVENDEMPADLPSLAADFVESKDVCKNYAEAKDVFL |
| | | GMFLYEYARRHPDYSWLLLRLAKTYETTLEKCCAAADPHECYAKVFDEFKPLVE |
| | | EPQNLIKQNCELFEQLGEYKFQNALLVRYTKKVPQVSTPTLVEVSRNLGKVGSK |
| | | CCKHPEAKRMPCAEDYLSVVLNQLCVLHEKTPVSDRVTKCCTESLVNRRPCFSA |
| | | LEVDETYVPKEFNAETFTFHADICTLSEKERQIKKQTALVELVKHKPKATKEQLKA |
| | | VMDDFAAFVEKCCKADDKETCFAEEGKKLVAASQAALGLHHHHHH |
| 29 | FP110 | ctggacatctgcagcaagaacccctgccacaacggcggcctgtgcgaagagatcagccaggaagtgcgggg |
| | nucleic acid | cgacgtgttccccagctacacctgtacctgcctgaagggctacgccggcaaccactgcgagactaagtgcgtgg |
| | | aacccctgggcatggaaaacggcaatatcgccaacagccagatcgccgccagctccgtgcgcgtgacctttctg |
| | | ggactgcagcactgggtgcccgagctggccagactgaacagagccggcatggtgaacgcctggacccccagc |
| | | agcaacgacgacaacccttggatccaggtgaacctgctgcggcggatgtgggtgacaggcgtggtgacacagg |
| | | gcgccagcagactggccagccacgagtacctgaaggcctttaaggtggcctacagcctgaacggccacgagtt |
| | | cgacttcatccacgacgtgaacaagaaacacaaagaatttgtgggcaactggaacaagaacgccgtgcacgtg |
| | | aacctgttcgagacacccgtggaagcccagtacgtgcggctgtaccccaccagctgccacaccgcctgcaccct |
| | | gagattcgagctgctgggctgcgagctgaacggctgcgccaaccccctgggcctgaagaacaacagcatcccc |
| | | gacaagcagatcaccgcctccagcagctacaagacctggggcctgcacctgttcagctggaaccccagctacg |
| | | cccggctggacaagcagggcaacttcaacgcctgggtggccggcagctacggcaacgaccagtggctgcagg |
| | | tggacctgggcagcagcaaagaagtgaccggcatcatcacccagggggccagaaacttcggcagcgtgcagt |
| | | tcgtggccagctacaaagtggcctactccaacgacagcgccaactggaccgagtaccaggacccccggaccg |
| | | gcagctccaagatcttccccggcaactgggacaaccacagccacaagaagaatctgttcgaaacccccatcct |
| | | ggccagatacgtgcggatcctgcccgtggcctggcacaaccggatcgccctgagactggaactgctgggatgtg |
| | | gaggaagcggaggatctggcggttccggaggctctgacgcccacaagagcgaggtggcccaccggttcaagg |
| | | acctgggcgaggaaaacttcaaggccctggtgctgatcgccttcgcccagtacctgcagcagagccccttcgaa |
| | | gatcacgtaaagttagtcaacgaggttacggaattcgcaaagacatgcgttgctgacgaatccgctgagaattgtg |
| | | acaagagtttgcacactttattcggagataagttgtgtactgtagctactttgagagagacttacggtgaaatggctg |
| | | actgctgtgcaaaacaggaaccagaacgtaacgaatgtttccttcagcataaggatgataaccctaaccttccaa |
| | | ggcttgttaggccagaagtcgacgtgatgtgcaccgccttccatgataatgaagagacttttcttaaaaagtacctat |
| | | acgagattgcaaggcgtcatccatatttttacgccccagagctgttgtttttcgcaaagagatacaaagctgcatttac |
| | | tgagtgttgccaagctgccgacaaggccgcttgtttgctaccaaagttggacgaattgagagacgagggtaaggc |
| | | atcatctgccaagcagagattaaaatgtgcatctttgcaaaaatttggagagagagcttttaaggcatgggctgttg |
| | | cccgactaagccaaagattcccaaaagccgaatttgctgaagtatccaagctggtgactgatttgactaaagtaca |
| | | tacagaatgttgccatggcgaccttttagaatgtgctgatgacagagcagatttggctaagtatatctgcgaaaatca |
| | | agattcaatcagctctaagctgaaggaatgttgcgagaaaccactgttagaaaaatcgcattgtattgctgaagttg |
| | | aaaatgatgagatgcctgctgacttgccttctcttgccgctgattttgttgagtcgaaggatgtctgtaagaattatgctg |
| | | aagctaaagacgttttcctgggtatgttcttatatgagtacgcaagacgtcacccagattactctgtggttctgctactg |
| | | agattggctaaaacatacgagacaacgctggagaagtgctgtgctgccgctgaccctcatgagtgctatgcaaa |
| | | ggtttttgatgaattcaaaccattggttgaagagcctcaaaacttgataaagcagaactgtgagctgtttgagcaatt |
| | | gggtgagtataagttccaaaatgccctgttggtgagatatacaaaaaaggtaccccaagtttcaacgcccacttta |
| | | gttgaagtgtccagaaatcttggtaaagtgggtagcaaatgttgcaagcatccagaagccaagcgaatgccctgt |
| | | gctgaggattatctgtccgtcgtgttgaaccaattgtgcgtattacacgaaaaaaccccagtctctgatagagtcacc |
| | | aaatgttgcactgagtcactagttaatagaaggccttgtttttccgctttggaagttgatgaaacctacgtgcctaagg |
| | | aatttaacgctgagacctttacctttcacgctgacatttgtactttgagtgaaaaagagcgtcaaatcaaaaagcaa |
| | | accgctcttgttgaattggtgaaacacaagcctaaggctacgaaggagcagcttaaagccgtcatggacgatttc |
| | | gccgcatttgttgaaaaatgctgtaaagctgatgacaaggaaacatgtttcgctgaagagggaaagaaattggttg |
| | | cggccagtcaggccgcacttggtttgcaccatcatcaccatcac |
| 30 | FP220 | DAHKSEVAHRFKDLGEENFKALVLIAFAQYLQQSPFEDHVKLVNEVTEFAKTCVA |
| | HSA-EGF-C1- | DESAENCDKSLHTLFGDKLCTVATLRETYGEMADCCAKQEPERNECFLQHKDD |
| | C2 | NPNLPRLVRPEVDVMCTAFHDNEETFLKKYLYEIARRHPYFYAPELLFFAKRYKA |
| | | AFTECCQAADKAACLLPKLDELRDEGKASSAKQRLKCASLQKFGERAFKAWAVA |
| | | RLSQRFPKAEFAEVSKLVTDLTKVHTECCHGDLLECADDRADLAKYICENQDSIS |
| | | SKLKECCEKPLLEKSHCIAEVENDEMPADLPSLAADFVESKDVCKNYAEAKDVFL |
| | | GMFLYEYARRHPDYSVVLLLRLAKTYETTLEKCCAAADPHECYAKVFDEFKPLVE |
| | | EPQNLIKQNCELFEQLGEYKFQNALLVRYTKKVPQVSTPTLVEVSRNLGKVGSK |
| | | CCKHPEAKRMPCAEDYLSVVLNQLCVLHEKTPVSDRVTKCCTESLVNRRPCFSA |
| | | LEVDETYVPKEFNAETFTFHADICTLSEKERQIKKQTALVELVKHKPKATKEQLKA |
| | | VMDDFAAFVEKCCKADDKETCFAEEGKKLVAASQAGGSGGSGGSGGSLDICSK |
| | | NPCHNGGLCEEISQEVRGDVFPSYTCTCLKGYAGNHCETKCVEPLGMENGNIA |
| | | NSQIAASSVRVTFLGLQHWVPELARLNRAGMVNAWTPSSNDDNPWIQVNLLRR |
| | | MWVTGWTQGASRLASHEYLKAFKVAYSLNGHEFDFIHDVNKKHKEFVGNWNK |
| | | NAVHVNLFETPVEAQYVRLYPTSCHTACTLRFELLGCELNGCANPLGLKNNSIPD |
| | | KQITASSSYKTWGLHLFSWNPSYARLDKQGNFNAWVAGSYGNDQWLQVDLGS |
| | | SKEVTGIITQGARNFGSVQFVASYKVAYSNDSANWTEYQDPRTGSSKIFPGNWD |
| | | NHSHKKNLFETPILARYVRILPVAWHNRIALRLELLGCGSHHHHHH |
| 31 | FP220 | gacgcccacaagagcgaggtggcccaccggttcaaggacctgggcgaggaaaacttcaaggccctggtgctg |
| | nucleic acid | atcgccttcgcccagtacctgcagcagagccccttcgaagatcacgtaaagttagtcaacgaggttacggaattc |
| | | gcaaagacatgcgttgctgacgaatccgctgagaattgtgacaagagtttgcacactttattcggagataagttgtgt |
| | | actgtagctactttgagagagacttacggtgaaatggctgactgctgtgcaaaacaggaaccagaacgtaacga |
| | | atgtttccttcagcataaggatgataaccctaaccttccaaggcttgttaggccagaagtcgacgtgatgtgcaccg |
| | | ccttccatgataatgaagagacttttcttaaaaagtacctatacgagattgcaaggcgtcatccatatttttacgcccc |
| | | agagctgttgtttttcgcaaagagatacaaagctgcatttactgagtgttgccaagctgccgacaaggccgcttgttt |
| | | gctaccaaagttggacgaattgagagacgagggtaaggcatcatctgccaagcagagattaaaatgtgcatcttt |
| | | gcaaaaatttggagagagagcttttaaggcatgggctgttgcccgactaagccaaagattcccaaaagccgaatt |
| | | tgctgaagtatccaagctggtgactgatttgactaaagtacatacagaatgttgccatggcgaccttttagaatgtgct |
| | | gatgacagagcagatttggctaagtatatctgcgaaaatcaagattcaatcagctctaagctgaaggaatgttgcg |
| | | agaaaccactgttagaaaaatcgcattgtattgctgaagttgaaaatgatgagatgcctgctgacttgccttctcttgc |
| | | cgctgattttgttgagtcgaaggatgtctgtaagaattatgctgaagctaaagacgttttcctgggtatgttcttatatga |
| | | gtacgcaagacgtcacccagattactctgtggttctgctactgagattggctaaaacatacgagacaacgctggag |
| | | aagtgctgtgctgccgctgaccctcatgagtgctatgcaaaggtttttgatgaattcaaaccattggttgaagagcct |
| | | caaaacttgataaagcagaactgtgagctgtttgagcaattgggtgagtataagttccaaaatgccctgttggtgag |
| | | atatacaaaaaaggtaccccaagtttcaacgcccactttagttgaagtgtccagaaatcttggtaaagtgggtagc |
| | | aaatgttgcaagcatccagaagccaagcgaatgccctgtgctgaggattatctgtccgtcgtgttgaaccaattgtg |
| | | cgtattacacgaaaaaaccccagtctctgatagagtcaccaaatgttgcactgagtcactagttaatagaaggcctt |
| | | gtttttccgctttggaagttgatgaaacctacgtgcctaaggaatttaacgctgagacctttacctttcacgctgacattt |
| | | gtactttgagtgaaaaagagcgtcaaatcaaaaagcaaaccgctcttgttgaattggtgaaacacaagcctaagg |
| | | ctacgaaggagcagcttaaagccgtcatggacgatttcgccgcatttgttgaaaaatgctgtaaagctgatgacaa |
| | | ggaaacatgtttcgctgaagagggaaagaaattggttgcggccagtcaggccggaggaagcggaggatctgg |
| | | cggttccggaggctctctagacatctgcagcaagaacccctgccacaacggcggcctgtgcgaagagatcagc |
| | | caggaagtgcggggcgacgtgttccccagctacacctgtacctgcctgaagggctacgccggcaaccactgcg |
| | | agactaagtgcgtggaacccctgggcatggaaaacggcaatatcgccaacagccagatcgccgccagctccgt |
| | | gcgcgtgacctttctgggactgcagcactgggtgcccgagctggccagactgaacagagccggcatggtgaac |
| | | gcctggacccccagcagcaacgacgacaacccttggatccaggtgaacctgctgcggcggatgtgggtgacag |
| | | gcgtggtgacacagggcgccagcagactggccagccacgagtacctgaaggcctttaaggtggcctacagcct |
| | | gaacggccacgagttcgacttcatccacgacgtgaacaagaaacacaaagaatttgtgggcaactggaacaa |
| | | gaacgccgtgcacgtgaacctgttcgagacacccgtggaagcccagtacgtgcggctgtaccccaccagctgc |
| | | cacaccgcctgcaccctgagattcgagctgctgggctgcgagctgaacggctgcgccaaccccctgggcctgaa |
| | | gaacaacagcatccccgacaagcagatcaccgcctccagcagctacaagacctggggcctgcacctgttcagc |
| | | tggaaccccagctacgcccggctggacaagcagggcaacttcaacgcctgggtggccggcagctacggcaac |
| | | gaccagtggctgcaggtggacctgggcagcagcaaagaagtgaccggcatcatcacccagggggccagaaa |
| | | cttcggcagcgtgcagttcgtggccagctacaaagtggcctactccaacgacagcgccaactggaccgagtacc |
| | | aggacccccggaccggcagctccaagatcttccccggcaactgggacaaccacagccacaagaagaatctgt |
| | | tcgaaacccccatcctggccagatacgtgcggatcctgcccgtggcctggcacaaccggatcgccctgagactg |
| | | gaactgctgggatgtggctctcaccaccaccatcaccat |
| 32 | FP250 | LDICSKNPCHNGGLCEEISQEVRGDVFPSYTCTCLKGYAGNHCETKGSDAH |
| | EGF-HSA | KSEVAHRFKDLGEENFKALVLIAFAQYLQQSPFEDHVKLVNEVTEFAKTCVA |
| | | DESAENCDKSLHTLFGDKLCTVATLRETYGEMADCCAKQEPERNECFLQHK |
| | | DDNPNLPRLVRPEVDVMCTAFHDNEETFLKKYLYEIARRHPYFYAPELLFFA |
| | | KRYKAAFTECCQAADKAACLLPKLDELRDEGKASSAKQRLKCASLQKFGER |
| | | AFKAWAVARLSQRFPKAEFAEVSKLVTDLTKVHTECCHGDLLECADDRADL |
| | | AKYICENQDSISSKLKECCEKPLLEKSHCIAEVENDEMPADLPSLAADFVESK |
| | | DVCKNYAEAKDVFLGMFLYEYARRHPDYSWLLLRLAKTYETTLEKCCAAAD |
| | | PHECYAKVFDEFKPLVEEPQNLIKQNCELFEQLGEYKFQNALLVRYTKKVPQ |
| | | VSTPTLVEVSRNLGKVGSKCCKHPEAKRMPCAEDYLSWLNQLCVLHEKTP |
| | | VSDRVTKCCTESLVNRRPCFSALEVDETYVPKEFNAETFTFHADICTLSEKE |
| | | RQIKKQTALVELVKHKPKATKEQLKAVMDDFAAFVEKCCKADDKETCFAEEG |
| | | KKLVAASQAALG LGSHHHHHH |
| 33 | FP250 | ctggacatctgcagcaagaatccttgccacaacggcggcctgtgcgaagagatttctcaagaagtgcggg |
| | nucleic acid | gcgacgttttccccagctacacctgtacatgtctgaagggctacgccggcaaccactgcgagacaaaagg |
| | | atccgatgctcacaagagcgaggtggcccacagattcaaggatctgggcgaagagaacttcaaggccct |
| | | ggtgctgatcgccttcgctcagtatctccagcagagccctttcgaggaccacgtgaagctggtcaacgaagt |
| | | gaccgagttcgccaagacctgtgtggccgatgagagcgccgagaactgtgataagagcctgcacaccctg |
| | | ttcggcgacaagctgtgtacagtggccacactgagagaaacctacggcgagatggccgactgctgtgcca |
| | | agcaagagcccgagagaaacgagtgcttcctgcagcacaaggacgacaaccccaacctgcctagactc |
| | | gtgcgacccgaagtggatgtgatgtgcaccgcctttcacgacaacgaggaaaccttcctgaagaagtacct |
| | | gtacgagatcgccagacggcacccctacttttatgcccctgagctgctgttcttcgccaagcggtataaggcc |
| | | gccttcaccgaatgttgccaggccgctgataaggctgcctgtctgctgcctaagctggacgagctgagagat |
| | | gagggcaaagccagctctgccaagcagagactgaagtgcgccagcctgcagaagttcggcgagagag |
| | | cttttaaggcctgggccgttgccagactgagccagagatttcctaaggccgagtttgccgaggtgtccaagct |
| | | cgtgaccgatctgacaaaggtgcacaccgagtgctgtcacggcgatctgctggaatgtgccgacgataga |
| | | gccgacctggccaagtacatctgcgagaaccaggacagcatcagcagcaagctgaaagagtgctgcga |
| | | gaagcccctgctggaaaagtctcactgtatcgccgaggtggaaaacgacgagatgcctgccgatctgccta |
| | | gcctggctgccgatttcgtggaaagcaaggacgtgtgcaagaactacgccgaggccaaggatgtgtttctg |
| | | ggcatgtttctgtatgagtacgcccgcagacaccccgactattctgtggttctgctgctgcggctggccaaaac |
| | | ctacgagacaaccctggaaaaatgctgcgccgctgccgatcctcacgagtgttatgccaaggtgttcgacg |
| | | agttcaagcctctggtggaagaaccccagaacctgatcaagcagaactgcgagctgttcgagcagctggg |
| | | cgagtacaagttccagaatgccctgctcgtgcggtacaccaagaaagtgcctcaggtgtccacacctacac |
| | | tggttgaggtgtcccggaatctgggcaaagtgggcagcaagtgttgcaagcaccctgaggccaagagaat |
| | | gccttgcgccgaggattacctgagcgtggtgctgaatcagctgtgcgtgctgcacgagaaaacccctgtgtc |
| | | cgacagagtgaccaagtgctgtaccgagagcctcgtgaacagaaggccttgctttagcgccctggaagtg |
| | | gacgagacatacgtgcccaaagagttcaacgccgagacattcaccttccacgccgacatctgtaccctgag |
| | | cgagaaagagcggcagatcaagaagcagacagccctggtcgagctggttaagcacaagcccaaggcc |
| | | accaaagaacagctgaaggccgtgatggacgacttcgccgcctttgtcgagaagtgctgcaaggccgacg |
| | | acaaagagacatgcttcgccgaagagggcaagaaactggtggctgcctctcaggctgctctcggacttggc |
| | | tctcaccaccaccatcaccat |
| 34 | FP260 | LDICSKNPCHNGGLCEEISQEVRGDVFPSYTCTCLKGYAGNHCETKGSDAH |
| | EGF-HSA-C1 | KSEVAHRFKDLGEENFKALVLIAFAQYLQQSPFEDHVKLVNEVTEFAKTCVA |
| | | DESAENCDKSLHTLFGDKLCTVATLRETYGEMADCCAKQEPERNECFLQHK |
| | | DDNPNLPRLVRPEVDVMCTAFHDNEETFLKKYLYEIARRHPYFYAPELLFFA |
| | | KRYKAAFTECCQAADKAACLLPKLDELRDEGKASSAKQRLKCASLQKFGER |
| | | AFKAWAVARLSQRFPKAEFAEVSKLVTDLTKVHTECCHGDLLECADDRADL |
| | | AKYICENQDSISSKLKECCEKPLLEKSHCIAEVENDEMPADLPSLAADFVESK |
| | | DVCKNYAEAKDVFLGMFLYEYARRHPDYSWLLLRLAKTYETTLEKCCAAAD |
| | | PHECYAKVFDEFKPLVEEPQNLIKQNCELFEQLGEYKFQNALLVRYTKKVPQ |
| | | VSTPTLVEVSRNLGKVGSKCCKHPEAKRMPCAEDYLSWLNQLCVLHEKTP |
| | | VSDRVTKCCTESLVNRRPCFSALEVDETYVPKEFNAETFTFHADICTLSEKE |
| | | RQIKKQTALVELVKHKPKATKEQLKAVMDDFAAFVEKCCKADDKETCFAEEG |
| | | KKLVAASQAALGLGGSGGSGGSGGSCVEPLGMENGNIANSQIAASSVRVTF |
| | | LGLQHVWPELARLNRAGMVNAWTPSSNDDNPWIQVNLLRRMWVTGWTQ |
| | | GASRLASHEYLKAFKVAYSLNGHEFDFIHDVNKKHKEFVGNWNKNAVHVNL |
| | | FETPVEAQYVRLYPTSCHTACTLRFELLGCGSHHHHHH |
| 35 | FP260 | ctggacatctgcagcaagaatccttgccacaacggcggcctgtgcgaagagatttctcaagaagtgcggg |
| | nucleic acid | gcgacgttttccccagctacacctgtacatgtctgaagggctacgccggcaaccactgcgagacaaaagg |
| | | atccgatgctcacaagagcgaggtggcccacagattcaaggatctgggcgaagagaacttcaaggccct |
| | | ggtgctgatcgccttcgctcagtatctccagcagagccctttcgaggaccacgtgaagctggtcaacgaagt |
| | | gaccgagttcgccaagacctgtgtggccgatgagagcgccgagaactgtgataagagcctgcacaccctg |
| | | ttcggcgacaagctgtgtacagtggccacactgagagaaacctacggcgagatggccgactgctgtgcca |
| | | agcaagagcccgagagaaacgagtgcttcctgcagcacaaggacgacaaccccaacctgcctagactc |
| | | gtgcgacccgaagtggatgtgatgtgcaccgcctttcacgacaacgaggaaaccttcctgaagaagtacct |
| | | gtacgagatcgccagacggcacccctacttttatgcccctgagctgctgttcttcgccaagcggtataaggcc |
| | | gccttcaccgaatgttgccaggccgctgataaggctgcctgtctgctgcctaagctggacgagctgagagat |
| | | gagggcaaagccagctctgccaagcagagactgaagtgcgccagcctgcagaagttcggcgagagag |
| | | cttttaaggcctgggccgttgccagactgagccagagatttcctaaggccgagtttgccgaggtgtccaagct |
| | | cgtgaccgatctgacaaaggtgcacaccgagtgctgtcacggcgatctgctggaatgtgccgacgataga |
| | | gccgacctggccaagtacatctgcgagaaccaggacagcatcagcagcaagctgaaagagtgctgcga |
| | | gaagcccctgctggaaaagtctcactgtatcgccgaggtggaaaacgacgagatgcctgccgatctgccta |
| | | gcctggctgccgatttcgtggaaagcaaggacgtgtgcaagaactacgccgaggccaaggatgtgtttctg |
| | | ggcatgtttctgtatgagtacgcccgcagacaccccgactattctgtggttctgctgctgcggctggccaaaac |
| | | ctacgagacaaccctggaaaaatgctgcgccgctgccgatcctcacgagtgttatgccaaggtgttcgacg |
| | | agttcaagcctctggtggaagaaccccagaacctgatcaagcagaactgcgagctgttcgagcagctggg |
| | | cgagtacaagttccagaatgccctgctcgtgcggtacaccaagaaagtgcctcaggtgtccacacctacac |
| | | tggttgaggtgtcccggaatctgggcaaagtgggcagcaagtgttgcaagcaccctgaggccaagagaat |
| | | gccttgcgccgaggattacctgagcgtggtgctgaatcagctgtgcgtgctgcacgagaaaacccctgtgtc |
| | | cgacagagtgaccaagtgctgtaccgagagcctcgtgaacagaaggccttgctttagcgccctggaagtg |
| | | gacgagacatacgtgcccaaagagttcaacgccgagacattcaccttccacgccgacatctgtaccctgag |
| | | cgagaaagagcggcagatcaagaagcagacagccctggtcgagctggttaagcacaagcccaaggcc |
| | | accaaagaacagctgaaggccgtgatggacgacttcgccgcctttgtcgagaagtgctgcaaggccgacg |
| | | acaaagagacatgcttcgccgaagagggcaagaaactggtggctgcctctcaggctgctctcggacttgg |
| | | aggaagcggaggatctggcggttccggaggctcttgtgtggaacccctcggcatggaaaacggcaatatc |
| | | gccaatagccagattgccgccagcagcgtcagagtgacatttctgggactgcagcactgggtgcccgagct |
| | | ggctagactgaatagagccggcatggtcaacgcctggacacccagcagcaacgacgataacccttggatt |
| | | caagtgaacctgctgcggcgtatgtgggtcacaggtgttgttacacagggcgcctctagactggccagccac |
| | | gagtatctgaaggcctttaaggtggcctacagcctgaacggccacgagttcgacttcatccacgacgtgaac |
| | | aagaagcacaaagagtttgtcggcaactggaacaagaacgccgtgcacgtgaacctgttcgagacacct |
| | | gtggaagcccagtacgtgcggctgtaccctacaagctgtcacaccgcctgcactctgagattcgaactgctg |
| | | ggatgcggctctcaccaccaccatcaccat |
| 36 | FP270 | LDICSKNPCHNGGLCEEISQEVRGDVFPSYTCTCLKGYAGNHCETKGSDAH |
| | EGF-HSA-C2 | KSEVAHRFKDLGEENFKALVLIAFAQYLQQSPFEDHVKLVNEVTEFAKTCVA |
| | | DESAENCDKSLHTLFGDKLCTVATLRETYGEMADCCAKQEPERNECFLQHK |
| | | DDNPNLPRLVRPEVDVMCTAFHDNEETFLKKYLYEIARRHPYFYAPELLFFA |
| | | KRYKAAFTECCQAADKAACLLPKLDELRDEGKASSAKQRLKCASLQKFGER |
| | | AFKAWAVARLSQRFPKAEFAEVSKLVTDLTKVHTECCHGDLLECADDRADL |
| | | AKYICENQDSISSKLKECCEKPLLEKSHCIAEVENDEMPADLPSLAADFVESK |
| | | DVCKNYAEAKDVFLGMFLYEYARRHPDYSWLLLRLAKTYETTLEKCCAAAD |
| | | PHECYAKVFDEFKPLVEEPQNLIKQNCELFEQLGEYKFQNALLVRYTKKVPQ |
| | | VSTPTLVEVSRNLGKVGSKCCKHPEAKRMPCAEDYLSWLNQLCVLHEKTP |
| | | VSDRVTKCCTESLVNRRPCFSALEVDETYVPKEFNAETFTFHADICTLSEKE |
| | | RQIKKQTALVELVKHKPKATKEQLKAVMDDFAAFVEKCCKADDKETCFAEEG |
| | | KKLVAASQAALGLGGSGGSGGSGGSCANPLGLKNNSIPDKQITASSSYKTW |
| | | GLHLFSWNPSYARLDKQGNFNAWVAGSYGNDQWLQVDLGSSKEVTGIITQ |
| | | GARNFGSVQFVASYKVAYSNDSANWTEYQDPRTGSSKIFPGNWDNHSHKK |
| | | NLFETPILARYVRILPVAWHNRIALRLELLGCGSHHHHHH |
| 37 | FP270 | ctggacatctgcagcaagaatccttgccacaacggcggcctgtgcgaagagatttctcaagaagtgcggg |
| | nucleic acid | gcgacgttttccccagctacacctgtacatgtctgaagggctacgccggcaaccactgcgagacaaaagg |
| | | atccgacgcccacaagagcgaggtggcccaccggttcaaggacctgggcgaggaaaacttcaaggccc |
| | | tggtgctgatcgccttcgcccagtacctgcagcagagccccttcgaagatcacgtaaagttagtcaacgagg |
| | | ttacggaattcgcaaagacatgcgttgctgacgaatccgctgagaattgtgacaagagtttgcacactttattc |
| | | ggagataagttgtgtactgtagctactttgagagagacttacggtgaaatggctgactgctgtgcaaaacagg |
| | | aaccagaacgtaacgaatgtttccttcagcataaggatgataaccctaaccttccaaggcttgttaggccag |
| | | aagtcgacgtgatgtgcaccgccttccatgataatgaagagacttttcttaaaaagtacctatacgagattgca |
| | | aggcgtcatccatatttttacgccccagagctgttgtttttcgcaaagagatacaaagctgcatttactgagtgtt |
| | | gccaagctgccgacaaggccgcttgtttgctaccaaagttggacgaattgagagacgagggtaaggcatc |
| | | atctgccaagcagagattaaaatgtgcatctttgcaaaaatttggagagagagcttttaaggcatgggctgttg |
| | | cccgactaagccaaagattcccaaaagccgaatttgctgaagtatccaagctggtgactgatttgactaaag |
| | | tacatacagaatgttgccatggcgaccttttagaatgtgctgatgacagagcagatttggctaagtatatctgc |
| | | gaaaatcaagattcaatcagctctaagctgaaggaatgttgcgagaaaccactgttagaaaaatcgcattgt |
| | | attgctgaagttgaaaatgatgagatgcctgctgacttgccttctcttgccgctgattttgttgagtcgaaggatgt |
| | | ctgtaagaattatgctgaagctaaagacgttttcctgggtatgttcttatatgagtacgcaagacgtcacccaga |
| | | ttactctgtggttctgctactgagattggctaaaacatacgagacaacgctggagaagtgctgtgctgccgctg |
| | | accctcatgagtgctatgcaaaggtttttgatgaattcaaaccattggttgaagagcctcaaaacttgataaag |
| | | cagaactgtgagctgtttgagcaattgggtgagtataagttccaaaatgccctgttggtgagatatacaaaaa |
| | | aggtaccccaagtttcaacgcccactttagttgaagtgtccagaaatcttggtaaagtgggtagcaaatgttgc |
| | | aagcatccagaagccaagcgaatgccctgtgctgaggattatctgtccgtcgtgttgaaccaattgtgcgtatt |
| | | acacgaaaaaaccccagtctctgatagagtcaccaaatgttgcactgagtcactagttaatagaaggccttg |
| | | tttttccgctttggaagttgatgaaacctacgtgcctaaggaatttaacgctgagacctttacctttcacgctgac |
| | | atttgtactttgagtgaaaaagagcgtcaaatcaaaaagcaaaccgctcttgttgaattggtgaaacacaag |
| | | cctaaggctacgaaggagcagcttaaagccgtcatggacgatttcgccgcatttgttgaaaaatgctgtaaa |
| | | gctgatgacaaggaaacatgtttcgctgaagagggaaagaaattggttgcggccagtcaggccgcacttg |
| | | gtttgggaggaagcggaggatctggcggttccggaggctcttgcgccaaccccctgggcctgaagaacaa |
| | | cagcatccccgacaagcagatcaccgcctccagcagctacaagacctggggcctgcacctgttcagctgg |
| | | aaccccagctacgcccggctggacaagcagggcaacttcaacgcctgggtggccggcagctacggcaa |
| | | cgaccagtggctgcaggtggacctgggcagcagcaaagaagtgaccggcatcatcacccagggggcca |
| | | gaaacttcggcagcgtgcagttcgtggccagctacaaagtggcctactccaacgacagcgccaactggac |
| | | cgagtaccaggacccccggaccggcagctccaagatcttccccggcaactgggacaaccacagccaca |
| | | agaagaatctgttcgaaacccccatcctggccagatacgtgcggatcctgcccgtggcctggcacaaccgg |
| | | atcgccctgagactggaactgctgggatgtggctctcaccaccaccatcaccat |
| 38 | FP280 | LDICSKNPCHNGGLCEEISQEVRGEVFPSYTCTCLKGYAGNHCETKGSDAH |
| | EGF(RGE)- | KSEVAHRFKDLGEENFKALVLIAFAQYLQQSPFEDHVKLVNEVTEFAKTCVA |
| | HSA-C1-C2 | DESAENCDKSLHTLFGDKLCTVATLRETYGEMADCCAKQEPERNECFLQHK |
| | | DDNPNLPRLVRPEVDVMCTAFHDNEETFLKKYLYEIARRHPYFYAPELLFFA |
| | | KRYKAAFTECCQAADKAACLLPKLDELRDEGKASSAKQRLKCASLQKFGER |
| | | AFKAWAVARLSQRFPKAEFAEVSKLVTDLTKVHTECCHGDLLECADDRADL |
| | | AKYICENQDSISSKLKECCEKPLLEKSHCIAEVENDEMPADLPSLAADFVESK |
| | | DVCKNYAEAKDVFLGMFLYEYARRHPDYSWLLLRLAKTYETTLEKCCAAAD |
| | | PHECYAKVFDEFKPLVEEPQNLIKQNCELFEQLGEYKFQNALLVRYTKKVPQ |
| | | VSTPTLVEVSRNLGKVGSKCCKHPEAKRMPCAEDYLSWLNQLCVLHEKTP |
| | | VSDRVTKCCTESLVNRRPCFSALEVDETYVPKEFNAETFTFHADICTLSEKE |
| | | RQIKKQTALVELVKHKPKATKEQLKAVMDDFAAFVEKCCKADDKETCFAEEG |
| | | KKLVAASQAALGLGGSGGSGGSGGSCVEPLGMENGNIANSQIAASSVRVTF |
| | | LGLQHVWPELARLNRAGMVNAWTPSSNDDNPWIQVNLLRRMWVTGWTQ |
| | | GASRLASHEYLKAFKVAYSLNGHEFDFIHDVNKKHKEFVGNWNKNAVHVNL |
| | | FETPVEAQYVRLYPTSCHTACTLRFELLGCELNGCANPLGLKNNSIPDKQITA |
| | | SSSYKTWGLHLFSWNPSYARLDKQGNFNAVWAGSYGNDQWLQVDLGSSK |
| | | EVTGIITQGARNFGSVQFVASYKVAYSNDSANWTEYQDPRTGSSKIFPGNW |
| | | DNHSHKKNLFETPILARYVRILPVAWHNRIALRLELLGCGSHHHHHH |
| 39 | FP280 | ctggacatctgcagcaagaatccttgccacaacggcggcctgtgcgaagagatttctcaagaagtgcggg |
| | nucleic acid | gcgaggttttccccagctacacctgtacatgtctgaagggctacgccggcaaccactgcgagacaaaagg |
| | | atccgatgctcacaagagcgaggtggcccacagattcaaggatctgggcgaagagaacttcaaggccct |
| | | ggtgctgatcgccttcgctcagtatctccagcagagccctttcgaggaccacgtgaagctggtcaacgaagt |
| | | gaccgagttcgccaagacctgtgtggccgatgagagcgccgagaactgtgataagagcctgcacaccctg |
| | | ttcggcgacaagctgtgtacagtggccacactgagagaaacctacggcgagatggccgactgctgtgcca |
| | | agcaagagcccgagagaaacgagtgcttcctgcagcacaaggacgacaaccccaacctgcctagactc |
| | | gtgcgacccgaagtggatgtgatgtgcaccgcctttcacgacaacgaggaaaccttcctgaagaagtacct |
| | | gtacgagatcgccagacggcacccctacttttatgcccctgagctgctgttcttcgccaagcggtataaggcc |
| | | gccttcaccgaatgttgccaggccgctgataaggctgcctgtctgctgcctaagctggacgagctgagagat |
| | | gagggcaaagccagctctgccaagcagagactgaagtgcgccagcctgcagaagttcggcgagagag |
| | | cttttaaggcctgggccgttgccagactgagccagagatttcctaaggccgagtttgccgaggtgtccaagct |
| | | cgtgaccgatctgacaaaggtgcacaccgagtgctgtcacggcgatctgctggaatgtgccgacgataga |
| | | gccgacctggccaagtacatctgcgagaaccaggacagcatcagcagcaagctgaaagagtgctgcga |
| | | gaagcccctgctggaaaagtctcactgtatcgccgaggtggaaaacgacgagatgcctgccgatctgccta |
| | | gcctggctgccgatttcgtggaaagcaaggacgtgtgcaagaactacgccgaggccaaggatgtgtttctg |
| | | ggcatgtttctgtatgagtacgcccgcagacaccccgactattctgtggttctgctgctgcggctggccaaaac |
| | | ctacgagacaaccctggaaaaatgctgcgccgctgccgatcctcacgagtgttatgccaaggtgttcgacg |
| | | agttcaagcctctggtggaagaaccccagaacctgatcaagcagaactgcgagctgttcgagcagctggg |
| | | cgagtacaagttccagaatgccctgctcgtgcggtacaccaagaaagtgcctcaggtgtccacacctacac |
| | | tggttgaggtgtcccggaatctgggcaaagtgggcagcaagtgttgcaagcaccctgaggccaagagaat |
| | | gccttgcgccgaggattacctgagcgtggtgctgaatcagctgtgcgtgctgcacgagaaaacccctgtgtc |
| | | cgacagagtgaccaagtgctgtaccgagagcctcgtgaacagaaggccttgctttagcgccctggaagtg |
| | | gacgagacatacgtgcccaaagagttcaacgccgagacattcaccttccacgccgacatctgtaccctgag |
| | | cgagaaagagcggcagatcaagaagcagacagccctggtcgagctggttaagcacaagcccaaggcc |
| | | accaaagaacagctgaaggccgtgatggacgacttcgccgcctttgtcgagaagtgctgcaaggccgacg |
| | | acaaagagacatgcttcgccgaagagggcaagaaactggtggctgcctctcaggctgctctcggacttgg |
| | | aggaagcggaggatctggcggttccggaggctcttgtgtggaacccctcggcatggaaaacggcaatatc |
| | | gccaatagccagattgccgccagcagcgtcagagtgacatttctgggactgcagcactgggtgcccgagct |
| | | ggctagactgaatagagccggcatggtcaacgcctggacacccagcagcaacgacgataacccttggatt |
| | | caagtgaacctgctgcggcgtatgtgggtcacaggtgttgttacacagggcgcctctagactggccagccac |
| | | gagtatctgaaggcctttaaggtggcctacagcctgaacggccacgagttcgacttcatccacgacgtgaac |
| | | aagaagcacaaagagtttgtcggcaactggaacaagaacgccgtgcacgtgaacctgttcgagacacct |
| | | gtggaagcccagtacgtgcggctgtaccctacaagctgtcacaccgcctgcactctgagattcgaactgctg |
| | | ggatgcgagctgaacggctgtgctaatcctctgggcctgaagaacaacagcatccccgataagcagatca |
| | | ccgccagctccagctataagacatggggcctgcacctgttcagctggaacccttcttacgccagactggaca |
| | | agcagggcaacttcaatgcttgggtggccggcagctacggcaatgatcagtggctgcaagtggacctggg |
| | | cagcagcaaagaagtgacaggcatcatcacccagggcgccagaaatttcggcagcgtgcagtttgtggcc |
| | | agctacaaagtggcctactccaacgacagcgccaactggaccgagtatcaggaccctagaaccggcag |
| | | ctccaagatcttccccggcaattgggacaaccacagccacaagaagaatctgttcgaaacccctatcctgg |
| | | ccagatatgtgcgcattctgcccgtggcctggcacaacagaattgccctgagactggaactgctcggctgtg |
| | | gctctcaccaccaccatcaccat |
| 40 | FP320 | LDICSKNPCHNGGLCEEISQEVRGDVFPSYTCTCLKGYAGNHCETKGSLVEEPQ |
| | EGF-HSA D3- | NLIKQNCELFEQLGEYKFQNALLVRYTKKVPQVSTPTLVEVSRNLGKVGSKCCK |
| | C1-C2-His | HPEAKRMPCAEDCLSVFLNQLCVLHEKTPVSDRVTKCCTESLVNGRPCFSALEV |
| | | DETYVPKEFNAETFTFHADICTLSEKERQIKKQTALVELVKHKPKATKEQLKAVM |
| | | DDFAAFVEKCCKADDKETCFAEEGKKLVAASQAALGLGGSGGSGGSGGSCVEP |
| | | LGMENGNIANSQIAASSVRVTFLGLQHWVPELARLNRAGMVNAWTPSSNDDNP |
| | | WIQVNLLRRMWVTGVVTQGASRLASHEYLKAFKVAYSLNGHEFDFIHDVNKKHK |
| | | EFVGNWNKNAVHVNLFETPVEAQYVRLYPTSCHTACTLRFELLGCELNGCANPL |
| | | GLKNNSIPDKQITASSSYKTWGLHLFSWNPSYARLDKQGNFNAWVAGSYGNDQ |
| | | WLQVDLGSSKEVTGIITQGARNFGSVQFVASYKVAYSNDSANWTEYQDPRTGS |
| | | SKIFPGNWDNHSHKKNLFETPILARYVRILPVAWHNRIALRLELLGCGSHHHHHH |
| 41 | FP320 | ctggacatctgcagcaagaatccttgccacaacggcggcctgtgcgaagagatttctcaagaagtgcggggcga |
| | nucleic acid | cgttttccccagctacacctgtacatgtctgaagggctacgccggcaaccactgcgagacaaaaggatccctggt |
| | | ggaagaaccccagaacctgatcaagcagaactgcgagctgttcgagcagctgggcgagtacaagttccagaat |
| | | gccctgctcgtgcggtacaccaagaaagtgcctcaggtgtccacacctacactggtcgaggtgtccagaaacctg |
| | | ggcaaagtgggcagcaagtgctgcaagcaccctgaggccaaaagaatgccttgcgccgaggattgcctgagc |
| | | gtgttcctgaatcagctgtgcgtgctgcacgagaaaacccctgtgtccgacagagtgaccaagtgctgtaccgag |
| | | agcctggtcaacggcagaccttgctttagcgccctggaagtggatgagacatacgtgcccaaagagttcaacgc |
| | | cgagacattcaccttccacgccgacatctgtaccctgagcgagaaagagcggcagatcaagaagcagacagc |
| | | cctggtcgagctggtcaagcacaagcctaaggccaccaaagaacagctgaaggccgtgatggacgacttcgc |
| | | cgccttcgtggaaaagtgttgcaaggccgacgacaaagagacatgcttcgccgaagagggcaagaaactggt |
| | | ggctgcctctcaggctgctctcggacttggaggaagcggaggatctggcggttccggaggctcttgtgtggaaccc |
| | | ctcggcatggaaaacggcaatatcgccaatagccagatcgccgccagcagcgtcagagtgacatttctgggact |
| | | gcagcactgggtgccagagctggctagactgaatagagccggcatggtcaacgcctggacacccagcagcaa |
| | | cgacgacaacccctggattcaagtgaacctgctgcggcgtatgtgggtcacaggtgttgttacacagggcgcctct |
| | | agactggccagccacgagtatctgaaggcctttaaggtggcctacagcctgaacggccacgagttcgacttcatc |
| | | cacgacgtgaacaagaagcacaaagagtttgtcggcaactggaacaagaacgccgtgcacgtgaacctgttcg |
| | | agacacctgtggaagcccagtacgtgcggctgtaccctacaagctgtcacaccgcctgcacactgagattcgaa |
| | | ctgctgggatgcgagctgaacggctgtgctaatcctctgggcctgaagaacaacagcatccccgataagcagat |
| | | caccgcctccagcagctataagacatggggcctgcacctgttcagctggaaccctagctacgccagactggaca |
| | | agcagggcaactttaatgcctgggtggccggcagctacggcaatgatcaatggctgcaagtggacctgggcagc |
| | | agcaaagaagtgaccggcatcattacccagggcgcaagaaatttcggcagcgtgcagttcgtggccagctaca |
| | | aagtggcctactccaacgacagcgccaactggaccgagtatcaggaccctagaaccggcagctccaagatctt |
| | | ccccggcaattgggacaaccacagccacaagaagaatctgttcgaaacccctatcctggccagatatgtgcgca |
| | | ttctgcccgtggcctggcacaacagaattgccctgagactggaactgctcggctgtggctctcaccaccaccatca |
| | | ccat |
| 42 | FP330 | LDICSKNPCHNGGLCEEISQEVRGDVFPSYTCTCLKGYAGNHCETKGSDAHKSE |
| | EGF-HSA-C1- | VAHRFKDLGEENFKALVLIAFAQYLQQSPFEDHVKLVNEVTEFAKTCVADESAEN |
| | C2 | CDKSLHTLFGDKLCTVATLRETYGEMADCCAKQEPERNECFLQHKDDNPNLPRL |
| | | VRPEVDVMCTAFHDNEETFLKKYLYEIARRHPYFYAPELLFFAKRYKAAFTECCQ |
| | | AADKAACLLPKLDELRDEGKASSAKQRLKCASLQKFGERAFKAWAVARLSQRFP |
| | | KAEFAEVSKLVTDLTKVHTECCHGDLLECADDRADLAKYICENQDSISSKLKECC |
| | | EKPLLEKSHCIAEVENDEMPADLPSLAADFVESKDVCKNYAEAKDVFLGMFLYEY |
| | | ARRHPDYSVVLLLRLAKTYETTLEKCCAAADPHECYAKVFDEFKPLVEEPQNLIK |
| | | QNCELFEQLGEYKFQNALLVRYTKKVPQVSTPTLVEVSRNLGKVGSKCCKHPEA |
| | | KRMPCAEDYLSVVLNQLCVLHEKTPVSDRVTKCCTESLVNRRPCFSALEVDETY |
| | | VPKEFNAETFTFHADICTLSEKERQIKKQTALVELVKHKPKATKEQLKAVMDDFA |
| | | AFVEKCCKADDKETCFAEEGKKLVAASQAALGLGGSGGSGGSGGSCVEPLGM |
| | | ENGNIANSQIAASSVRVTFLGLQHWVPELARLNRAGMVNAWTPSSNDDNPWIQ |
| | | VNLLRRMWVTGVVTQGASRLASHEYLKAFKVAYSLNGHEFDFIHDVNKKHKEFV |
| | | GNWNKNAVHVNLFETPVEAQYVRLYPTSCHTACTLRFELLGCELNGCANPLGLK |
| | | NNSIPDKQITASSSYKTWGLHLFSWNPSYARLDKQGNFNAWVAGSYGNDQWLQ |
| | | VDLGSSKEVTGIITQGARNFGSVQFVASYKVAYSNDSANWTEYQDPRTGSSKIF |
| | | PGNWDNHSHKKNLFETPILARYVRILPVAWHNRIALRLELLGC |
| 43 | FP330 | ctggacatctgcagcaagaatccttgccacaacggcggcctgtgcgaagagatttctcaagaagtgcggggcga |
| | nucleic acid | cgttttccccagctacacctgtacatgtctgaagggctacgccggcaaccactgcgagacaaaaggatccgatgc |
| | | tcacaagagcgaggtggcccacagattcaaggatctgggcgaagagaacttcaaggccctggtgctgatcgcct |
| | | tcgctcagtatctccagcagagccctttcgaggaccacgtgaagctggtcaacgaagtgaccgagttcgccaag |
| | | acctgtgtggccgatgagagcgccgagaactgtgataagagcctgcacaccctgttcggcgacaagctgtgtac |
| | | agtggccacactgagagaaacctacggcgagatggccgactgctgtgccaagcaagagcccgagagaaacg |
| | | agtgcttcctgcagcacaaggacgacaaccccaacctgcctagactcgtgcgacccgaagtggatgtgatgtgc |
| | | accgcctttcacgacaacgaggaaaccttcctgaagaagtacctgtacgagatcgccagacggcacccctacttt |
| | | tatgcccctgagctgctgttcttcgccaagcggtataaggccgccttcaccgaatgttgccaggccgctgataaggc |
| | | tgcctgtctgctgcctaagctggacgagctgagagatgagggcaaagccagctctgccaagcagagactgaagt |
| | | gcgccagcctgcagaagttcggcgagagagcttttaaggcctgggccgttgccagactgagccagagatttccta |
| | | aggccgagtttgccgaggtgtccaagctcgtgaccgatctgacaaaggtgcacaccgagtgctgtcacggcgat |
| | | ctgctggaatgtgccgacgatagagccgacctggccaagtacatctgcgagaaccaggacagcatcagcagc |
| | | aagctgaaagagtgctgcgagaagcccctgctggaaaagtctcactgtatcgccgaggtggaaaacgacgag |
| | | atgcctgccgatctgcctagcctggctgccgatttcgtggaaagcaaggacgtgtgcaagaactacgccgaggccaa |
| | | ggatgtgtttctgggcatgtttctgtatgagtacgcccgcagacaccccgactattctgtggttctgctgctgcgg |
| | | ctggccaaaacctacgagacaaccctggaaaaatgctgcgccgctgccgatcctcacgagtgttatgccaaggt |
| | | gttcgacgagttcaagcctctggtggaagaaccccagaacctgatcaagcagaactgcgagctgttcgagcagc |
| | | tgggcgagtacaagttccagaatgccctgctcgtgcggtacaccaagaaagtgcctcaggtgtccacacctacac |
| | | tggttgaggtgtcccggaatctgggcaaagtgggcagcaagtgttgcaagcaccctgaggccaagagaatgcct |
| | | tgcgccgaggattacctgagcgtggtgctgaatcagctgtgcgtgctgcacgagaaaacccctgtgtccgacaga |
| | | gtgaccaagtgctgtaccgagagcctcgtgaacagaaggccttgctttagcgccctggaagtggacgagacata |
| | | cgtgcccaaagagttcaacgccgagacattcaccttccacgccgacatctgtaccctgagcgagaaagagcgg |
| | | cagatcaagaagcagacagccctggtcgagctggttaagcacaagcccaaggccaccaaagaacagctgaa |
| | | ggccgtgatggacgacttcgccgcctttgtcgagaagtgctgcaaggccgacgacaaagagacatgcttcgccg |
| | | aagagggcaagaaactggtggctgcctctcaggctgctctcggacttggaggaagcggaggatctggcggttcc |
| | | ggaggctcttgtgtggaacccctcggcatggaaaacggcaatatcgccaatagccagattgccgccagcagcgt |
| | | cagagtgacatttctgggactgcagcactgggtgcccgagctggctagactgaatagagccggcatggtcaacg |
| | | cctggacacccagcagcaacgacgataacccttggattcaagtgaacctgctgcggcgtatgtgggtcacaggt |
| | | gttgttacacagggcgcctctagactggccagccacgagtatctgaaggcctttaaggtggcctacagcctgaac |
| | | ggccacgagttcgacttcatccacgacgtgaacaagaagcacaaagagtttgtcggcaactggaacaagaacg |
| | | ccgtgcacgtgaacctgttcgagacacctgtggaagcccagtacgtgcggctgtaccctacaagctgtcacaccg |
| | | cctgcactctgagattcgaactgctgggatgcgagctgaacggctgtgctaatcctctgggcctgaagaacaaca |
| | | gcatccccgataagcagatcaccgccagctccagctataagacatggggcctgcacctgttcagctggaaccctt |
| | | cttacgccagactggacaagcagggcaacttcaatgcttgggtggccggcagctacggcaatgatcagtggctg |
| | | caagtggacctgggcagcagcaaagaagtgacaggcatcatcacccagggcgccagaaatttcggcagcgtg |
| | | cagtttgtggccagctacaaagtggcctactccaacgacagcgccaactggaccgagtatcaggaccctagaac |
| | | cggcagctccaagatcttccccggcaattgggacaaccacagccacaagaagaatctgttcgaaacccctatcc |
| | | tggccagatatgtgcgcattctgcccgtggcctggcacaacagaattgccctgagactggaactgctcggctgt |
| 44 | FP278 | LDICSKNPCHNGGLCEEISQEVRGDVFPSYTCTCLKGYAGNHCETKGSDAHKSE |
| | EGF-HSA-C1- | VAHRFKDLGEENFKALVLIAFAQYLQQSPFEDHVKLVNEVTEFAKTCVADESAEN |
| | C2 His tag | CDKSLHTLFGDKLCTVATLRETYGEMADCCAKQEPERNECFLQHKDDNPNLPRL |
| | | VRPEVDVMCTAFHDNEETFLKKYLYEIARRHPYFYAPELLFFAKRYKAAFTECCQ |
| | | AADKAACLLPKLDELRDEGKASSAKQRLKCASLQKFGERAFKAWAVARLSQRFP |
| | | KAEFAEVSKLVTDLTKVHTECCHGDLLECADDRADLAKYICENQDSISSKLKECC |
| | | EKPLLEKSHCIAEVENDEMPADLPSLAADFVESKDVCKNYAEAKDVFLGMFLYEY |
| | | ARRHPDYSVVLLLRLAKTYETTLEKCCAAADPHECYAKVFDEFKPLVEEPQNLIK |
| | | QNCELFEQLGEYKFQNALLVRYTKKVPQVSTPTLVEVSRNLGKVGSKCCKHPEA |
| | | KRMPCAEDYLSVVLNQLCVLHEKTPVSDRVTKCCTESLVNRRPCFSALEVDETY |
| | | VPKEFNAETFTFHADICTLSEKERQIKKQTALVELVKHKPKATKEQLKAVMDDFA |
| | | AFVEKCCKADDKETCFAEEGKKLVAASQAALGLGGSGGSGGSGGSCVEPLGM |
| | | ENGNIANSQIAASSVRVTFLGLQHWVPELARLNRAGMVNAWTPSSNDDNPWIQ |
| | | VNLLRRMWVTGVVTQGASRLASHEYLKAFKVAYSLNGHEFDFIHDVNKKHKEFV |
| | | GNWNKNAVHVNLFETPVEAQYVRLYPTSCHTACTLRFELLGCELNGCANPLGLK |
| | | NNSIPDKQITASSSYKTWGLHLFSWNPSYARLDKQGNFNAWVAGSYGNDQWLQ |
| | | VDLGSSKEVTGIITQGARNFGSVQFVASYKVAYSNDSANWTEYQDPRTGSSKIF |
| | | PGNWDNHSHKKNLFETPILARYVRILPVAWHNRIALRLELLGCGSHHHHHH |
| 45 | FP278 | ctggacatctgcagcaagaatccttgccacaacggcggcctgtgcgaagagatttctcaagaagtgcggggcga |
| | nucleic acid | cgttttccccagctacacctgtacatgtctgaagggctacgccggcaaccactgcgagacaaaaggatccgatgc |
| | | tcacaagagcgaggtggcccacagattcaaggatctgggcgaagagaacttcaaggccctggtgctgatcgcct |
| | | tcgctcagtatctccagcagagccctttcgaggaccacgtgaagctggtcaacgaagtgaccgagttcgccaag |
| | | acctgtgtggccgatgagagcgccgagaactgtgataagagcctgcacaccctgttcggcgacaagctgtgtac |
| | | agtggccacactgagagaaacctacggcgagatggccgactgctgtgccaagcaagagcccgagagaaacg |
| | | agtgcttcctgcagcacaaggacgacaaccccaacctgcctagactcgtgcgacccgaagtggatgtgatgtgc |
| | | accgcctttcacgacaacgaggaaaccttcctgaagaagtacctgtacgagatcgccagacggcacccctacttt |
| | | tatgcccctgagctgctgttcttcgccaagcggtataaggccgccttcaccgaatgttgccaggccgctgataaggc |
| | | tgcctgtctgctgcctaagctggacgagctgagagatgagggcaaagccagctctgccaagcagagactgaagt |
| | | gcgccagcctgcagaagttcggcgagagagcttttaaggcctgggccgttgccagactgagccagagatttccta |
| | | aggccgagtttgccgaggtgtccaagctcgtgaccgatctgacaaaggtgcacaccgagtgctgtcacggcgat |
| | | ctgctggaatgtgccgacgatagagccgacctggccaagtacatctgcgagaaccaggacagcatcagcagc |
| | | aagctgaaagagtgctgcgagaagcccctgctggaaaagtctcactgtatcgccgaggtggaaaacgacgag |
| | | atgcctgccgatctgcctagcctggctgccgatttcgtggaaagcaaggacgtgtgcaagaactacgccgaggccaa |
| | | ggatgtgtttctgggcatgtttctgtatgagtacgcccgcagacaccccgactattctgtggttctgctgctgcgg |
| | | ctggccaaaacctacgagacaaccctggaaaaatgctgcgccgctgccgatcctcacgagtgttatgccaaggt |
| | | gttcgacgagttcaagcctctggtggaagaaccccagaacctgatcaagcagaactgcgagctgttcgagcagc |
| | | tgggcgagtacaagttccagaatgccctgctcgtgcggtacaccaagaaagtgcctcaggtgtccacacctacac |
| | | tggttgaggtgtcccggaatctgggcaaagtgggcagcaagtgttgcaagcaccctgaggccaagagaatgcct |
| | | tgcgccgaggattacctgagcgtggtgctgaatcagctgtgcgtgctgcacgagaaaacccctgtgtccgacaga |
| | | gtgaccaagtgctgtaccgagagcctcgtgaacagaaggccttgctttagcgccctggaagtggacgagacata |
| | | cgtgcccaaagagttcaacgccgagacattcaccttccacgccgacatctgtaccctgagcgagaaagagcgg |
| | | cagatcaagaagcagacagccctggtcgagctggttaagcacaagcccaaggccaccaaagaacagctgaa |
| | | ggccgtgatggacgacttcgccgcctttgtcgagaagtgctgcaaggccgacgacaaagagacatgcttcgccg |
| | | aagagggcaagaaactggtggctgcctctcaggctgctctcggacttggaggaagcggaggatctggcggttcc |
| | | ggaggctcttgtgtggaacccctcggcatggaaaacggcaatatcgccaatagccagattgccgccagcagcgt |
| | | cagagtgacatttctgggactgcagcactgggtgcccgagctggctagactgaatagagccggcatggtcaacg |
| | | cctggacacccagcagcaacgacgataacccttggattcaagtgaacctgctgcggcgtatgtgggtcacaggt |
| | | gttgttacacagggcgcctctagactggccagccacgagtatctgaaggcctttaaggtggcctacagcctgaac |
| | | ggccacgagttcgacttcatccacgacgtgaacaagaagcacaaagagtttgtcggcaactggaacaagaacg |
| | | ccgtgcacgtgaacctgttcgagacacctgtggaagcccagtacgtgcggctgtaccctacaagctgtcacaccg |
| | | cctgcactctgagattcgaactgctgggatgcgagctgaacggctgtgctaatcctctgggcctgaagaacaaca |
| | | gcatccccgataagcagatcaccgccagctccagctataagacatggggcctgcacctgttcagctggaaccctt |
| | | cttacgccagactggacaagcagggcaacttcaatgcttgggtggccggcagctacggcaatgatcagtggctg |
| | | caagtggacctgggcagcagcaaagaagtgacaggcatcatcacccagggcgccagaaatttcggcagcgtg |
| | | cagtttgtggccagctacaaagtggcctactccaacgacagcgccaactggaccgagtatcaggaccctagaac |
| | | cggcagctccaagatcttccccggcaattgggacaaccacagccacaagaagaatctgttcgaaacccctatcc |
| | | tggccagatatgtgcgcattctgcccgtggcctggcacaacagaattgccctgagactggaactgctcggctgtgg |
| | | ctctcaccaccaccatcaccat |
| 46 | FP068 | LDICSKNPCHNGGLCEEISQEVRGDVFPSYTCTCLKGYAGNHCETKDAHKSEVA |
| | | HRFKDLGEENFKALVLIAFAQYLQQSPFEDHVKLVNEVTEFAKTCVADESAENCD |
| | | KSLHTLFGDKLCTVATLRETYGEMADCCAKQEPERNECFLQHKDDNPNLPRLVR |
| | | PEVDVMCTAFHDNEETFLKKYLYEIARRHPYFYAPELLFFAKRYKAAFTECCQAA |
| | | DKAACLLPKLDELRDEGKASSAKQRLKCASLQKFGERAFKAWAVARLSQRFPKA |
| | | EFAEVSKLVTDLTKVHTECCHGDLLECADDRADLAKYICENQDSISSKLKECCEK |
| | | PLLEKSHCIAEVENDEMPADLPSLAADFVESKDVCKNYAEAKDVFLGMFLYEYAR |
| | | RHPDYSVVLLLRLAKTYETTLEKCCAAADPHECYAKVFDEFKPLVEEPQNLIKQN |
| | | CELFEQLGEYKFQNALLVRYTKKVPQVSTPTLVEVSRNLGKVGSKCCKHPEAKR |
| | | MPCAEDYLSVVLNQLCVLHEKTPVSDRVTKCCTESLVNRRPCFSALEVDETYVP |
| | | KEFNAETFTFHADICTLSEKERQIKKQTALVELVKHKPKATKEQLKAVMDDFAAFV |
| | | EKCCKADDKETCFAEEGKKLVAASQAALCVEPLGMENGNIANSQIAASSVRVTFL |
| | | GLQHWVPELARLNRAGMVNAWTPSSNDDNPWIQVNLLRRMWVTGVVTQGASR |
| | | LASHEYLKAFKVAYSLNGHEFDFIHDVNKKHKEFVGNWNKNAVHVNLFETPVEA |
| | | QYVRLYPTSCHTACTLRFELLGCELNGCANPLGLKNNSIPDKQITASSSYKTWGL |
| | | HLFSWNPSYARLDKQGNFNAWVAGSYGNDQWLQVDLGSSKEVTGIITQGARNF |
| | | GSVQFVASYKVAYSNDSANWTEYQDPRTGSSKIFPGNWDNHSHKKNLFETPILA |
| | | RYVRILPVAWHNRIALRLELLGC |
| 47 | FP068 | ctggacatctgtagcaagaacccttgccacaacggcggcctgtgcgaagagatttctcaagaagtgcggggcga |
| | nucleic acid | cgttttccccagctacacctgtacatgtctgaagggctacgccggcaaccactgcgagacaaaggatgcccaca |
| | | agagcgaggtggcccacagattcaaggatctgggcgaagagaacttcaaggccctggtgctgatcgccttcgct |
| | | cagtatctccagcagagccctttcgaggaccacgtgaagctggtcaacgaagtgaccgagttcgccaagacctg |
| | | tgtggccgatgagagcgccgagaactgtgataagagcctgcacaccctgttcggcgacaagctgtgtacagtgg |
| | | ccacactgagagaaacctacggcgagatggccgactgctgtgccaagcaagagcccgagagaaacgagtgc |
| | | ttcctccagcacaaggacgacaaccccaacctgcctagactcgtgcgacccgaagtggatgtgatgtgcaccgc |
| | | ctttcacgacaacgaggaaaccttcctgaagaagtacctgtacgagatcgccagacggcacccctacttttatgcc |
| | | cctgagctgctgttcttcgccaagcggtataaggccgccttcaccgaatgttgccaggccgctgataaggctgcctg |
| | | tctgctgcctaagctggacgagctgagagatgagggcaaagccagctctgccaagcagagactgaaatgcgcc |
| | | agcctccagaagttcggcgagagagcttttaaggcctgggccgttgccagactgagccagagatttcctaaggcc |
| | | gagtttgccgaggtgtccaagctcgtgaccgatctgacaaaggtgcacaccgagtgctgtcacggcgatctgctg |
| | | gaatgtgccgacgatagagccgacctggccaagtacatctgcgagaaccaggacagcatcagcagcaagctg |
| | | aaagagtgctgcgagaagcccctgctggaaaagtctcactgtatcgccgaggtggaaaacgacgagatgcctg |
| | | ccgatctgcctagcctggctgccgatttcgtggaaagcaaggacgtgtgcaagaactacgccgaggccaaggat |
| | | gtgtttctgggcatgtttctgtatgagtacgcccgcagacaccccgactattctgtggttctgctgctgcggctggcca |
| | | aaacctacgagacaaccctggaaaaatgctgcgccgctgccgatcctcacgagtgttatgccaaggtgttcgac |
| | | gagttcaagcctctggtggaagaaccccagaacctgatcaagcagaactgcgagctgttcgagcagctgggcg |
| | | agtacaagttccagaatgccctgctcgtgcggtacaccaagaaagtgcctcaggtgtccacacctacactggttg |
| | | aggtgtcccggaatctgggcaaagtgggcagcaagtgttgcaagcaccctgaggccaagagaatgccttgcgc |
| | | cgaggattacctgagcgtggtgctgaatcagctgtgcgtgctgcacgagaaaacccctgtgtccgacagagtgac |
| | | caagtgctgtaccgagagcctcgtgaacagaaggccttgctttagcgccctggaagtggacgagacatacgtgc |
| | | ccaaagagttcaacgccgagacattcaccttccacgccgacatctgcaccctgtccgagaaagagcggcagat |
| | | caagaagcagacagccctggtcgagctggttaagcacaagcccaaggccaccaaagaacagctgaaggcc |
| | | gtgatggacgacttcgccgcctttgtcgagaagtgctgcaaggccgacgacaaagagacatgcttcgccgaaga |
| | | gggcaagaaactggtggctgcttctcaggccgctctgtgtgtggaacccctcggcatggaaaacggcaatatcgc |
| | | caatagccagattgccgccagcagcgtcagagtgacatttctgggactgcaacactgggtgcccgagctggcta |
| | | gactgaatagagccggcatggtcaacgcctggacacccagcagcaacgacgataatccctggattcaagtgaa |
| | | cctgctgcggcgtatgtgggtcacaggtgttgttacacagggcgcaagcagactggccagccacgagtatctgaa |
| | | ggcctttaaggtggcctacagcctgaacggccacgagttcgacttcatccacgacgtgaacaagaagcacaaa |
| | | gagtttgtcggcaactggaacaagaacgccgtgcacgtgaacctgttcgagacacctgtggaagcccagtacgt |
| | | gcggctgtaccctacaagctgtcacaccgcctgcactctgagattcgaactgctgggatgcgagctgaacggctgt |
| | | gctaatcctctgggcctgaagaacaacagcatccccgataagcagatcaccgccagctccagctataagacatg |
| | | gggcctgcacctgttcagctggaacccttcttacgccagactggacaagcagggcaacttcaatgcttgggtggcc |
| | | ggcagctacggcaatgatcagtggctgcaagtggacctgggcagcagcaaagaagtgacaggcatcatcacc |
| | | caaggggccagaaatttcggcagcgtgcagttcgtggccagctacaaagtggcctactccaacgacagcgcca |
| | | actggaccgagtatcaggaccctagaaccggcagctccaagatcttccccggcaattgggacaaccacagcca |
| | | caagaagaatctgttcgaaacccctatcctggccagatatgtgcgcattctgcccgtggcctggcacaacagaatt |
| | | gccctgagactggaactgctcggctgc |
| 48 | FP776 | LDICSKNPCHNGGLCEEISQEVRGDVFPSYTCTCLKGYAGNHCETKDAHKSEVA |
| | | HRFKDLGEENFKALVLIAFAQYLQQSPFEDHVKLVNEVTEFAKTCVADESAENCD |
| | | KSLHTLFGDKLCTVATLRETYGEMADCCAKQEPERNECFLQHKDDNPNLPRLVR |
| | | PEVDVMCTAFHDNEETFLKKYLYEIARRHPYFYAPELLFFAKRYKAAFTECCQAA |
| | | DKAACLLPKLDELRDEGKASSAKQRLKCASLQKFGERAFKAWAVARLSQRFPKA |
| | | EFAEVSKLVTDLTKVHTECCHGDLLECADDRADLAKYICENQDSISSKLKECCEK |
| | | PLLEKSHCIAEVENDEMPADLPSLAADFVESKDVCKNYAEAKDVFLGMFLYEYAR |
| | | RHPDYSVVLLLRLAKTYETTLEKCCAAADPHECYAKVFDEFKPLVEEPQNLIKQN |
| | | CELFEQLGEYKFQNALLVRYTKKVPQVSTPTLVEVSRNLGKVGSKCCKHPEAKR |
| | | MPCAEDYLSVVLNQLCVLHEKTPVSDRVTKCCTESLVNRRPCFSALEVDETYVP |
| | | KEFNAETFTFHADICTLSEKERQIKKQTALVELVKHKPKATKEQLKAVMDDFAAFV |
| | | EKCCKADDKETCFAEEGKKLVACVEPLGMENGNIANSQIAASSVRVTFLGLQHW |
| | | VPELARLNRAGMVNAWTPSSNDDNPWIQVNLLRRMWVTGVVTQGASRLASHE |
| | | YLKAFKVAYSLNGHEFDFIHDVNKKHKEFVGNWNKNAVHVNLFETPVEAQYVRL |
| | | YPTSCHTACTLRFELLGCELNGCANPLGLKNNSIPDKQITASSSYKTWGLHLFSW |
| | | NPSYARLDKQGNFNAWVAGSYGNDQWLQVDLGSSKEVTGIITQGARNFGSVQF |
| | | VASYKVAYSNDSANWTEYQDPRTGSSKIFPGNWDNHSHKKNLFETPILARYVRIL |
| | | PVAWHNRIALRLELLGC |
| 49 | FP776 | ctggacatctgtagcaagaacccttgccacaacggcggcctgtgcgaagagatttctcaagaagtgcggggcga |
| | nucleic acid | cgttttccccagctacacctgtacatgtctgaagggctacgccggcaaccactgcgagacaaaggatgcccaca |
| | | agagcgaggtggcccacagattcaaggatctgggcgaagagaacttcaaggccctggtgctgatcgccttcgct |
| | | cagtatctccagcagagccctttcgaggaccacgtgaagctggtcaacgaagtgaccgagttcgccaagacctg |
| | | tgtggccgatgagagcgccgagaactgtgataagagcctgcacaccctgttcggcgacaagctgtgtacagtgg |
| | | ccacactgagagaaacctacggcgagatggccgactgctgtgccaagcaagagcccgagagaaacgagtgc |
| | | ttcctccagcacaaggacgacaaccccaacctgcctagactcgtgcgacccgaagtggatgtgatgtgcaccgcc |
| | | tttcacgacaacgaggaaaccttcctgaagaagtacctgtacgagatcgccagacggcacccctacttttatgcc |
| | | cctgagctgctgttcttcgccaagcggtataaggccgccttcaccgaatgttgccaggccgctgataaggctgcc |
| | | tgtctgctgcctaagctggacgagctgagagatgagggcaaagccagctctgccaagcagagactgaaatgcgcc |
| | | agcctccagaagttcggcgagagagcttttaaggcctgggccgttgccagactgagccagagatttcctaaggcc |
| | | gagtttgccgaggtgtccaagctcgtgaccgatctgacaaaggtgcacaccgagtgctgtcacggcgatctgctg |
| | | gaatgtgccgacgatagagccgacctggccaagtacatctgcgagaaccaggacagcatcagcagcaagctg |
| | | aaagagtgctgcgagaagcccctgctggaaaagtctcactgtatcgccgaggtggaaaacgacgagatgcctg |
| | | ccgatctgcctagcctggctgccgatttcgtggaaagcaaggacgtgtgcaagaactacgccgaggccaaggatgt |
| | | gtttctgggcatgtttctgtatgagtacgcccgcagacaccccgactattctgtggttctgctgctgcggctggc |
| | | caaaacctacgagacaaccctggaaaaatgctgcgccgctgccgatcctcacgagtgttatgccaaggtgttcgac |
| | | gagttcaagcctctggtggaagaaccccagaacctgatcaagcagaactgcgagctgttcgagcagctgggcg |
| | | agtacaagttccagaatgccctgctcgtgcggtacaccaagaaagtgcctcaggtgtccacacctacactggttg |
| | | aggtgtcccggaatctgggcaaagtgggcagcaagtgttgcaagcaccctgaggccaagagaatgccttgcgc |
| | | cgaggattacctgagcgtggtgctgaatcagctgtgcgtgctgcacgagaaaacccctgtgtccgacagagtgac |
| | | caagtgctgtaccgagagcctcgtgaacagaaggccttgctttagcgccctggaagtggacgagacatacgtgc |
| | | ccaaagagttcaacgccgagacattcaccttccacgccgacatctgcaccctgtccgagaaagagcggcagat |
| | | caagaagcagacagccctggtcgagctggttaagcacaagcccaaggccaccaaagaacagctgaaggcc |
| | | gtgatggacgacttcgccgcctttgtcgagaagtgctgcaaggccgacgacaaagagacatgcttcgccgaaga |
| | | gggcaagaaactggtggcctgtgtggaacccctcggcatggaaaacggcaatatcgccaatagccagattgcc |
| | | gccagcagcgtcagagtgacatttctgggactgcaacactgggtgcccgagctggctagactgaatagagccgg |
| | | catggtcaacgcctggacacccagcagcaacgacgataatccctggattcaagtgaacctgctgcggcgtatgt |
| | | gggtcacaggtgttgttacacagggcgcaagcagactggccagccacgagtatctgaaggcctttaaggtggcct |
| | | acagcctgaacggccacgagttcgacttcatccacgacgtgaacaagaagcacaaagagtttgtcggcaactg |
| | | gaacaagaacgccgtgcacgtgaacctgttcgagacacctgtggaagcccagtacgtgcggctgtaccctacaag |
| | | ctgtcacaccgcctgcactctgagattcgaactgctgggatgcgagctgaacggctgtgctaatcctctgggcct |
| | | gaagaacaacagcatccccgataagcagatcaccgccagctccagctataagacatggggcctgcacctgttc |
| | | agctggaacccttcttacgccagactggacaagcagggcaacttcaatgcttgggtggccggcagctacggcaa |
| | | tgatcagtggctgcaagtggacctgggcagcagcaaagaagtgacaggcatcatcacccaaggggccagaa |
| | | atttcggcagcgtgcagttcgtggccagctacaaagtggcctactccaacgacagcgccaactggaccgagtatc |
| | | aggaccctagaaccggcagctccaagatcttccccggcaattgggacaaccacagccacaagaagaatctgtt |
| | | cgaaacccctatcctggccagatatgtgcgcattctgcccgtggcctggcacaacagaattgccctgagactgga |
| | | actgctcggctgc |
| 50 | FP284 | LDICSKNPCHNGGLCEEISQEVRGDVFPSYTCTCLKGYAGNHCETKGSDAHKSE |
| | | VAHRFKDLGEENFKALVLIAFAQYLQQSPFEDHVKLVNEVTEFAKTCVADESAEN |
| | | CDKSLHTLFGDKLCTVATLRETYGEMADCCAKQEPERNECFLQHKDDNPNLPRL |
| | | VRPEVDVMCTAFHDNEETFLKKYLYEIARRHPYFYAPELLFFAKRYKAAFTECCQ |
| | | AADKAACLLPKLDELRDEGKASSAKQRLKCASLQKFGERAFKAWAVARLSQRFP |
| | | KAEFAEVSKLVTDLTKVHTECCHGDLLECADDRADLAKYICENQDSISSKLKECC |
| | | EKPLLEKSHCIAEVENDEMPADLPSLAADFVESKDVCKNYAEAKDVFLGMFLYEY |
| | | ARRHPDYSVVLLLRLAKTYETTLEKCCAAADPHECYAKVFDEFKPLVEEPQNLIK |
| | | QNCELFEQLGEYKFQNALLVRYTKKVPQVSTPTLVEVSRNLGKVGSKCCKHPEA |
| | | KRMPCAEDYLSVVLNQLCVLHEKTPVSDRVTKCCTESLVNRRPCFSALEVDETY |
| | | VPKEFNAETFTFHADICTLSEKERQIKKQTALVELVKHKPKATKEQLKAVMDDFA |
| | | AFVEKCCKADDKETCFAEEGKKLVAASQAALGVGGSGGSGGSGGSCVEPLGM |
| | | ENGNIANSQIAASSVRVTFLGLQHWVPELARLNRAGMVNAWTPSSNDDNPWIQ |
| | | VNLLRRMWVTGVVTQGASRLASHEYLKAFKVAYSLNGHEFDFIHDVNKKHKEFV |
| | | GNWNKNAVHVNLFETPVEAQYVRLYPTSCHTACTLRFELLGCELNGCANPLGLK |
| | | NNSIPDKQITASSSYKTWGLHLFSWNPSYARLDKQGNFNAWVAGSYGNDQWLQ |
| | | VDLGSSKEVTGIITQGARNFGSVQFVASYKVAYSNDSANWTEYQDPRTGSSKIF |
| | | PGNWDNHSHKKNLFETPILARYVRILPVAWHNRIALRLELLGC |
| 51 | FP284 | ctggacatctgcagcaagaatccttgccacaacggcggcctgtgcgaagagatttctcaagaagtgcggggcga |
| | nucleic acid | cgttttccccagctacacctgtacatgtctgaagggctacgccggcaaccactgcgagacaaaaggatccgatgc |
| | | tcacaagagcgaggtggcccacagattcaaggatctgggcgaagagaacttcaaggccctggtgctgatcgcct |
| | | tcgctcagtatctccagcagagccctttcgaggaccacgtgaagctggtcaacgaagtgaccgagttcgccaag |
| | | acctgtgtggccgatgagagcgccgagaactgtgataagagcctgcacaccctgttcggcgacaagctgtgtac |
| | | agtggccacactgagagaaacctacggcgagatggccgactgctgtgccaagcaagagcccgagagaaacg |
| | | agtgcttcctgcagcacaaggacgacaaccccaacctgcctagactcgtgcgacccgaagtggatgtgatgtgc |
| | | accgcctttcacgacaacgaggaaaccttcctgaagaagtacctgtacgagatcgccagacggcacccctacttt |
| | | tatgcccctgagctgctgttcttcgccaagcggtataaggccgccttcaccgaatgttgccaggccgctgataag |
| | | gctgcctgtctgctgcctaagctggacgagctgagagatgagggcaaagccagctctgccaagcagagactgaagt |
| | | gcgccagcctgcagaagttcggcgagagagcttttaaggcctgggccgttgccagactgagccagagatttccta |
| | | aggccgagtttgccgaggtgtccaagctcgtgaccgatctgacaaaggtgcacaccgagtgctgtcacggcgat |
| | | ctgctggaatgtgccgacgatagagccgacctggccaagtacatctgcgagaaccaggacagcatcagcagc |
| | | aagctgaaagagtgctgcgagaagcccctgctggaaaagtctcactgtatcgccgaggtggaaaacgacgag |
| | | atgcctgccgatctgcctagcctggctgccgatttcgtggaaagcaaggacgtgtgcaagaactacgccgaggcca |
| | | aggatgtgtttctgggcatgtttctgtatgagtacgcccgcagacaccccgactattctgtggttctgctgctgc |
| | | ggctggccaaaacctacgagacaaccctggaaaaatgctgcgccgctgccgatcctcacgagtgttatgccaaggt |
| | | gttcgacgagttcaagcctctggtggaagaaccccagaacctgatcaagcagaactgcgagctgttcgagcagc |
| | | tgggcgagtacaagttccagaatgccctgctcgtgcggtacaccaagaaagtgcctcaggtgtccacacctacac |
| | | tggttgaggtgtcccggaatctgggcaaagtgggcagcaagtgttgcaagcaccctgaggccaagagaatgcct |
| | | tgcgccgaggattacctgagcgtggtgctgaatcagctgtgcgtgctgcacgagaaaacccctgtgtccgacaga |
| | | gtgaccaagtgctgtaccgagagcctcgtgaacagaaggccttgctttagcgccctggaagtggacgagacata |
| | | cgtgcccaaagagttcaacgccgagacattcaccttccacgccgacatctgtaccctgagcgagaaagagcgg |
| | | cagatcaagaagcagacagccctggtcgagctggttaagcacaagcccaaggccaccaaagaacagctgaa |
| | | ggccgtgatggacgacttcgccgcctttgtcgagaagtgctgcaaggccgacgacaaagagacatgcttcgccg |
| | | aagagggcaagaaactggtggctgcctctcaggctgctctcggagtgggaggaagcggaggatctggcggttc |
| | | cggaggctcttgtgtggaacccctcggcatggaaaacggcaatatcgccaatagccagattgccgccagcagc |
| | | gtcagagtgacatttctgggactgcagcactgggtgcccgagctggctagactgaatagagccggcatggtcaac |
| | | gcctggacacccagcagcaacgacgataacccttggattcaagtgaacctgctgcggcgtatgtgggtcacagg |
| | | tgttgttacacagggcgcctctagactggccagccacgagtatctgaaggcctttaaggtggcctacagcctgaac |
| | | ggccacgagttcgacttcatccacgacgtgaacaagaagcacaaagagtttgtcggcaactggaacaagaacg |
| | | ccgtgcacgtgaacctgttcgagacacctgtggaagcccagtacgtgcggctgtaccctacaagctgtcacaccg |
| | | cctgcactctgagattcgaactgctgggatgcgagctgaacggctgtgctaatcctctgggcctgaagaacaaca |
| | | gcatccccgataagcagatcaccgccagctccagctataagacatggggcctgcacctgttcagctggaaccctt |
| | | cttacgccagactggacaagcagggcaacttcaatgcttgggtggccggcagctacggcaatgatcagtggctg |
| | | caagtggacctgggcagcagcaaagaagtgacaggcatcatcacccagggcgccagaaatttcggcagcgtg |
| | | cagtttgtggccagctacaaagtggcctactccaacgacagcgccaactggaccgagtatcaggaccctagaac |
| | | cggcagctccaagatcttccccggcaattgggacaaccacagccacaagaagaatctgttcgaaacccctatcc |
| | | tggccagatatgtgcgcattctgcccgtggcctggcacaacagaattgccctgagactggaactgctcggctgt |
| 52 | FP138 | LDICSKNPCHNGGLCEEISQEVRGDVFPSYTCTCLKGYAGNHCETKGSDAHKSE |
| | | VAHRFKDLGEENFKALVLIAFAQYLQQSPFEDHVKLVNEVTEFAKTCVADESAEN |
| | | CDKSLHTLFGDKLCTVATLRETYGEMADCCAKQEPERNECFLQHKDDNPNLPRL |
| | | VRPEVDVMCTAFHDNEETFLKKYLYEIARRHPYFYAPELLFFAKRYKAAFTECCQ |
| | | AADKAACLLPKLDELRDEGKASSAKQRLKCASLQKFGERAFKAWAVARLSQRFP |
| | | KAEFAEVSKLVTDLTKVHTECCHGDLLECADDRADLAKYICENQDSISSKLKECC |
| | | EKPLLEKSHCIAEVENDEMPADLPSLAADFVESKDVCKNYAEAKDVFLGMFLYEY |
| | | ARRHPDYSVVLLLRLAKTYETTLEKCCAAADPHECYAKVFDEFKPLVEEPQNLIK |
| | | QNCELFEQLGEYKFQNALLVRYTKKVPQVSTPTLVEVSRNLGKVGSKCCKHPEA |
| | | KRMPCAEDYLSVVLNQLCVLHEKTPVSDRVTKCCTESLVNRRPCFSALEVDETY |
| | | VPKEFNAETFTFHADICTLSEKERQIKKQTALVELVKHKPKATKEQLKAVMDDFA |
| | | AFVEKCCKADDKETCFAEEGKKLVAASQAALGGSGGSGGSGGSCVEPLGMEN |
| | | GNIANSQIAASSVRVTFLGLQHWVPELARLNRAGMVNAWTPSSNDDNPWIQVNL |
| | | LRRMWVTGWTQGASRLASHEYLKAFKVAYSLNGHEFDFIHDVNKKHKEFVGN |
| | | WNKNAVHVNLFETPVEAQYVRLYPTSCHTACTLRFELLGCELNGCANPLGLKNN |
| | | SIPDKQITASSSYKTWGLHLFSWNPSYARLDKQGNFNAWVAGSYGNDQWLQVD |
| | | LGSSKEVTGIITQGARNFGSVQFVASYKVAYSNDSANWTEYQDPRTGSSKIFPG |
| | | NWDNHSHKKNLFETPILARYVRILPVAWHNRIALRLELLGC |
| 53 | FP138 | ctggacatctgcagcaagaatccttgccacaacggcggcctgtgcgaagagatttctcaagaagtgcggggcga |
| | nucleic acid | cgttttccccagctacacctgtacatgtctgaagggctacgccggcaaccactgcgagacaaaaggatccgatgc |
| | | tcacaagagcgaggtggcccacagattcaaggatctgggcgaagagaacttcaaggccctggtgctgatcgcct |
| | | tcgctcagtatctccagcagagccctttcgaggaccacgtgaagctggtcaacgaagtgaccgagttcgccaag |
| | | acctgtgtggccgatgagagcgccgagaactgtgataagagcctgcacaccctgttcggcgacaagctgtgtac |
| | | agtggccacactgagagaaacctacggcgagatggccgactgctgtgccaagcaagagcccgagagaaacg |
| | | agtgcttcctgcagcacaaggacgacaaccccaacctgcctagactcgtgcgacccgaagtggatgtgatgtgc |
| | | accgcctttcacgacaacgaggaaaccttcctgaagaagtacctgtacgagatcgccagacggcacccctacttt |
| | | tatgcccctgagctgctgttcttcgccaagcggtataaggccgccttcaccgaatgttgccaggccgctgataag |
| | | gctgcctgtctgctgcctaagctggacgagctgagagatgagggcaaagccagctctgccaagcagagactgaagt |
| | | gcgccagcctgcagaagttcggcgagagagcttttaaggcctgggccgttgccagactgagccagagatttccta |
| | | aggccgagtttgccgaggtgtccaagctcgtgaccgatctgacaaaggtgcacaccgagtgctgtcacggcgat |
| | | ctgctggaatgtgccgacgatagagccgacctggccaagtacatctgcgagaaccaggacagcatcagcagc |
| | | aagctgaaagagtgctgcgagaagcccctgctggaaaagtctcactgtatcgccgaggtggaaaacgacgag |
| | | atgcctgccgatctgcctagcctggctgccgatttcgtggaaagcaaggacgtgtgcaagaactacgccgaggcc |
| | | aaggatgtgtttctgggcatgtttctgtatgagtacgcccgcagacaccccgactattctgtggttctgctgctgc |
| | | ggctggccaaaacctacgagacaaccctggaaaaatgctgcgccgctgccgatcctcacgagtgttatgccaaggt |
| | | gttcgacgagttcaagcctctggtggaagaaccccagaacctgatcaagcagaactgcgagctgttcgagcagc |
| | | tgggcgagtacaagttccagaatgccctgctcgtgcggtacaccaagaaagtgcctcaggtgtccacacctacac |
| | | tggttgaggtgtcccggaatctgggcaaagtgggcagcaagtgttgcaagcaccctgaggccaagagaatgcct |
| | | tgcgccgaggattacctgagcgtggtgctgaatcagctgtgcgtgctgcacgagaaaacccctgtgtccgacaga |
| | | gtgaccaagtgctgtaccgagagcctcgtgaacagaaggccttgctttagcgccctggaagtggacgagacata |
| | | cgtgcccaaagagttcaacgccgagacattcaccttccacgccgacatctgtaccctgagcgagaaagagcgg |
| | | cagatcaagaagcagacagccctggtcgagctggttaagcacaagcccaaggccaccaaagaacagctgaa |
| | | ggccgtgatggacgacttcgccgcctttgtcgagaagtgctgcaaggccgacgacaaagagacatgcttcgccg |
| | | aagagggcaagaaactggtggctgcctctcaggctgctctcggaggaagcggaggatctggcggttccggagg |
| | | ctcttgtgtggaacccctcggcatggaaaacggcaatatcgccaatagccagattgccgccagcagcgtcagag |
| | | tgacatttctgggactgcagcactgggtgcccgagctggctagactgaatagagccggcatggtcaacgcctgga |
| | | cacccagcagcaacgacgataacccttggattcaagtgaacctgctgcggcgtatgtgggtcacaggtgttgttac |
| | | acagggcgcctctagactggccagccacgagtatctgaaggcctttaaggtggcctacagcctgaacggccacg |
| | | agttcgacttcatccacgacgtgaacaagaagcacaaagagtttgtcggcaactggaacaagaacgccgtgca |
| | | cgtgaacctgttcgagacacctgtggaagcccagtacgtgcggctgtaccctacaagctgtcacaccgcctgcac |
| | | tctgagattcgaactgctgggatgcgagctgaacggctgtgctaatcctctgggcctgaagaacaacagcatccc |
| | | cgataagcagatcaccgccagctccagctataagacatggggcctgcacctgttcagctggaacccttcttacgc |
| | | cagactggacaagcagggcaacttcaatgcttgggtggccggcagctacggcaatgatcagtggctgcaagtg |
| | | gacctgggcagcagcaaagaagtgacaggcatcatcacccagggcgccagaaatttcggcagcgtgcagtttg |
| | | tggccagctacaaagtggcctactccaacgacagcgccaactggaccgagtatcaggaccctagaaccggcagc |
| | | tccaagatcttccccggcaattgggacaaccacagccacaagaagaatctgttcgaaacccctatcctggcc |
| | | agatatgtgcgcattctgcccgtggcctggcacaacagaattgccctgagactggaactgctcggctgt |
| 54 | FP811 | LDICSKNPCHNGGLCEEISQEVRGDVFPSYTCTCLKGYAGNHCETKGSDAHKSE |
| | | VAHRFKDLGEENFKALVLIAFAQYLQQSPFEDHVKLVNEVTEFAKTCVADESAEN |
| | | CDKSLHTLFGDKLCTVATLRETYGEMADCCAKQEPERNECFLQHKDDNPNLPRL |
| | | VRPEVDVMCTAFHDNEETFLKKYLYEIARRHPYFYAPELLFFAKRYKAAFTECCQ |
| | | AADKAACLLPKLDELRDEGKASSAKQRLKCASLQKFGERAFKAWAVARLSQRFP |
| | | KAEFAEVSKLVTDLTKVHTECCHGDLLECADDRADLAKYICENQDSISSKLKECC |
| | | EKPLLEKSHCIAEVENDEMPADLPSLAADFVESKDVCKNYAEAKDVFLGMFLYEY |
| | | ARRHPDYSVVLLLRLAKTYETTLEKCCAAADPHECYAKVFDEFKPLVEEPQNLIK |
| | | QNCELFEQLGEYKFQNALLVRYTKKVPQVSTPTLVEVSRNLGKVGSKCCKHPEA |
| | | KRMPCAEDYLSVVLNQLCVLHEKTPVSDRVTKCCTESLVNRRPCFSALEVDETY |
| | | VPKEFNAETFTFHADICTLSEKERQIKKQTALVELVKHKPKATKEQLKAVMDDFA |
| | | AFVEKCCKADDKETCFAEEGKKLVAASQAALGGGGSCVEPLGMENGNIANSQIA |
| | | ASSVRVTFLGLQHWVPELARLNRAGMVNAWTPSSNDDNPWIQVNLLRRMWVT |
| | | GVVTQGASRLASHEYLKAFKVAYSLNGHEFDFIHDVNKKHKEFVGNWNKNAVH |
| | | VNLFETPVEAQYVRLYPTSCHTACTLRFELLGCELNGCANPLGLKNNSIPDKQIT |
| | | ASSSYKTWGLHLFSWNPSYARLDKQGNFNAWVAGSYGNDQWLQVDLGSSKEV |
| | | TGIITQGARNFGSVQFVASYKVAYSNDSANWTEYQDPRTGSSKIFPGNWDNHSH |
| | | KKNLFETPILARYVRILPVAWHNRIALRLELLGC |
| 55 | FP811 | ctggacatctgcagcaagaatccttgccacaacggcggcctgtgcgaagagatttctcaagaagtgcggggcga |
| | nucleic acid | cgttttccccagctacacctgtacatgtctgaagggctacgccggcaaccactgcgagacaaaaggatccgatgc |
| | | tcacaagagcgaggtggcccacagattcaaggatctgggcgaagagaacttcaaggccctggtgctgatcgcct |
| | | tcgctcagtatctccagcagagccctttcgaggaccacgtgaagctggtcaacgaagtgaccgagttcgccaag |
| | | acctgtgtggccgatgagagcgccgagaactgtgataagagcctgcacaccctgttcggcgacaagctgtgtac |
| | | agtggccacactgagagaaacctacggcgagatggccgactgctgtgccaagcaagagcccgagagaaacg |
| | | agtgcttcctgcagcacaaggacgacaaccccaacctgcctagactcgtgcgacccgaagtggatgtgatgtgc |
| | | accgcctttcacgacaacgaggaaaccttcctgaagaagtacctgtacgagatcgccagacggcacccctacttt |
| | | tatgcccctgagctgctgttcttcgccaagcggtataaggccgccttcaccgaatgttgccaggccgctgataagg |
| | | ctgcctgtctgctgcctaagctggacgagctgagagatgagggcaaagccagctctgccaagcagagactgaagt |
| | | gcgccagcctgcagaagttcggcgagagagcttttaaggcctgggccgttgccagactgagccagagatttccta |
| | | aggccgagtttgccgaggtgtccaagctcgtgaccgatctgacaaaggtgcacaccgagtgctgtcacggcgat |
| | | ctgctggaatgtgccgacgatagagccgacctggccaagtacatctgcgagaaccaggacagcatcagcagc |
| | | aagctgaaagagtgctgcgagaagcccctgctggaaaagtctcactgtatcgccgaggtggaaaacgacgag |
| | | atgcctgccgatctgcctagcctggctgccgatttcgtggaaagcaaggacgtgtgcaagaactacgccgaggcca |
| | | aggatgtgtttctgggcatgtttctgtatgagtacgcccgcagacaccccgactattctgtggttctgctgctgc |
| | | ggctggccaaaacctacgagacaaccctggaaaaatgctgcgccgctgccgatcctcacgagtgttatgccaaggt |
| | | gttcgacgagttcaagcctctggtggaagaaccccagaacctgatcaagcagaactgcgagctgttcgagcagc |
| | | tgggcgagtacaagttccagaatgccctgctcgtgcggtacaccaagaaagtgcctcaggtgtccacacctacac |
| | | tggttgaggtgtcccggaatctgggcaaagtgggcagcaagtgttgcaagcaccctgaggccaagagaatgcct |
| | | tgcgccgaggattacctgagcgtggtgctgaatcagctgtgcgtgctgcacgagaaaacccctgtgtccgacaga |
| | | gtgaccaagtgctgtaccgagagcctcgtgaacagaaggccttgctttagcgccctggaagtggacgagacata |
| | | cgtgcccaaagagttcaacgccgagacattcaccttccacgccgacatctgtaccctgagcgagaaagagcgg |
| | | cagatcaagaagcagacagccctggtcgagctggttaagcacaagcccaaggccaccaaagaacagctgaa |
| | | ggccgtgatggacgacttcgccgcctttgtcgagaagtgctgcaaggccgacgacaaagagacatgcttcgccg |
| | | aagagggcaagaaactggtggctgcctctcaagctgctctcggaggcggaggatcttgtgtggaacccctcggc |
| | | atggaaaacggcaatatcgccaatagccagattgccgccagcagcgtcagagtgacatttctgggactgcagca |
| | | ctgggtgcccgagctggctagactgaatagagccggcatggtcaacgcctggacacccagcagcaacgacgata |
| | | acccttggattcaagtgaacctgctgcggcgtatgtgggtcacaggtgttgttacacagggcgcctctagactgg |
| | | ccagccacgagtatctgaaggcctttaaggtggcctacagcctgaacggccacgagttcgacttcatccacgacg |
| | | tgaacaagaagcacaaagagtttgtcggcaactggaacaagaacgccgtgcacgtgaacctgttcgagacacc |
| | | tgtggaagcccagtacgtgcggctgtaccctacaagctgtcacaccgcctgcactctgagattcgaactgctggga |
| | | tgcgagctgaacggctgtgctaatcctctgggcctgaagaacaacagcatccccgataagcagatcaccgccag |
| | | ctccagctataagacatggggcctgcacctgttcagctggaacccttcttacgccagactggacaagcagggcaa |
| | | cttcaatgcttgggtggccggcagctacggcaatgatcagtggctgcaagtggacctgggcagcagcaaagaa |
| | | gtgacaggcatcatcacccagggcgccagaaatttcggcagcgtgcagtttgtggccagctacaaagtggccta |
| | | ctccaacgacagcgccaactggaccgagtatcaggaccctagaaccggcagctccaagatcttccccggcaat |
| | | tgggacaaccacagccacaagaagaatctgttcgaaacccctatcctggccagatatgtgcgcattctgcccgtg |
| | | gcctggcacaacagaattgccctgagactggaactgctcggctgc |
| 56 | FP010 | LDICSKNPCHNGGLCEEISQEVRGDVFPSYTCTCLKGYAGNHCETKGSDAHKSE |
| | | VAHRFKDLGEENFKALVLIAFAQYLQQSPFEDHVKLVNEVTEFAKTCVADESAEN |
| | | CDKSLHTLFGDKLCTVATLRETYGEMADCCAKQEPERNECFLQHKDDNPNLPRL |
| | | VRPEVDVMCTAFHDNEETFLKKYLYEIARRHPYFYAPELLFFAKRYKAAFTECCQ |
| | | AADKAACLLPKLDELRDEGKASSAKQRLKCASLQKFGERAFKAWAVARLSQRFP |
| | | KAEFAEVSKLVTDLTKVHTECCHGDLLECADDRADLAKYICENQDSISSKLKECC |
| | | EKPLLEKSHCIAEVENDEMPADLPSLAADFVESKDVCKNYAEAKDVFLGMFLYEY |
| | | ARRHPDYSVVLLLRLAKTYETTLEKCCAAADPHECYAKVFDEFKPLVEEPQNLIK |
| | | QNCELFEQLGEYKFQNALLVRYTKKVPQVSTPTLVEVSRNLGKVGSKCCKHPEA |
| | | KRMPCAEDYLSVVLNQLCVLHEKTPVSDRVTKCCTESLVNRRPCFSALEVDETY |
| | | VPKEFNAETFTFHADICTLSEKERQIKKQTALVELVKHKPKATKEQLKAVMDDFA |
| | | AFVEKCCKADDKETCFAEEGKKLVAASQAALGGGGSGGGGSCVEPLGMENGNI |
| | | ANSQIAASSVRVTFLGLQHWVPELARLNRAGMVNAWTPSSNDDNPWIQVNLLR |
| | | RMWVTGWTQGASRLASHEYLKAFKVAYSLNGHEFDFIHDVNKKHKEFVGNWN |
| | | KNAVHVNLFETPVEAQYVRLYPTSCHTACTLRFELLGCELNGCANPLGLKNNSIP |
| | | DKQITASSSYKTWGLHLFSWNPSYARLDKQGNFNAWVAGSYGNDQWLQVDLG |
| | | SSKEVTGIITQGARNFGSVQFVASYKVAYSNDSANWTEYQDPRTGSSKIFPGNW |
| | | DNHSHKKNLFETPILARYVRILPVAWHNRIALRLELLGC |
| 57 | FP010 | ctggacatctgcagcaagaatccttgccacaacggcggcctgtgcgaagagatttctcaagaagtgcggggcga |
| | nucleic acid | cgttttccccagctacacctgtacatgtctgaagggctacgccggcaaccactgcgagacaaaaggatccgatgc |
| | | tcacaagagcgaggtggcccacagattcaaggatctgggcgaagagaacttcaaggccctggtgctgatcgcct |
| | | tcgctcagtatctccagcagagccctttcgaggaccacgtgaagctggtcaacgaagtgaccgagttcgccaag |
| | | acctgtgtggccgatgagagcgccgagaactgtgataagagcctgcacaccctgttcggcgacaagctgtgtac |
| | | agtggccacactgagagaaacctacggcgagatggccgactgctgtgccaagcaagagcccgagagaaacg |
| | | agtgcttcctgcagcacaaggacgacaaccccaacctgcctagactcgtgcgacccgaagtggatgtgatgtgc |
| | | accgcctttcacgacaacgaggaaaccttcctgaagaagtacctgtacgagatcgccagacggcacccctacttt |
| | | tatgcccctgagctgctgttcttcgccaagcggtataaggccgccttcaccgaatgttgccaggccgctgataag |
| | | gctgcctgtctgctgcctaagctggacgagctgagagatgagggcaaagccagctctgccaagcagagactgaagt |
| | | gcgccagcctgcagaagttcggcgagagagcttttaaggcctgggccgttgccagactgagccagagatttccta |
| | | aggccgagtttgccgaggtgtccaagctcgtgaccgatctgacaaaggtgcacaccgagtgctgtcacggcgat |
| | | ctgctggaatgtgccgacgatagagccgacctggccaagtacatctgcgagaaccaggacagcatcagcagc |
| | | aagctgaaagagtgctgcgagaagcccctgctggaaaagtctcactgtatcgccgaggtggaaaacgacgag |
| | | atgcctgccgatctgcctagcctggctgccgatttcgtggaaagcaaggacgtgtgcaagaactacgccgaggc |
| | | caaggatgtgtttctgggcatgtttctgtatgagtacgcccgcagacaccccgactattctgtggttctgctgctgc |
| | | ggctggccaaaacctacgagacaaccctggaaaaatgctgcgccgctgccgatcctcacgagtgttatgccaaggt |
| | | gttcgacgagttcaagcctctggtggaagaaccccagaacctgatcaagcagaactgcgagctgttcgagcagc |
| | | tgggcgagtacaagttccagaatgccctgctcgtgcggtacaccaagaaagtgcctcaggtgtccacacctacac |
| | | tggttgaggtgtcccggaatctgggcaaagtgggcagcaagtgttgcaagcaccctgaggccaagagaatgcct |
| | | tgcgccgaggattacctgagcgtggtgctgaatcagctgtgcgtgctgcacgagaaaacccctgtgtccgacaga |
| | | gtgaccaagtgctgtaccgagagcctcgtgaacagaaggccttgctttagcgccctggaagtggacgagacata |
| | | cgtgcccaaagagttcaacgccgagacattcaccttccacgccgacatctgtaccctgagcgagaaagagcgg |
| | | cagatcaagaagcagacagccctggtcgagctggttaagcacaagcccaaggccaccaaagaacagctgaa |
| | | ggccgtgatggacgacttcgccgcctttgtcgagaagtgctgcaaggccgacgacaaagagacatgcttcgccg |
| | | aagagggcaagaaactggtggctgcctctcaagctgctctcggaggcggaggctccggaggcggaggatcttg |
| | | tgtggaacccctcggcatggaaaacggcaatatcgccaatagccagattgccgccagcagcgtcagagtgaca |
| | | tttctgggactgcagcactgggtgcccgagctggctagactgaatagagccggcatggtcaacgcctggacacc |
| | | cagcagcaacgacgataacccttggattcaagtgaacctgctgcggcgtatgtgggtcacaggtgttgttacacag |
| | | ggcgcctctagactggccagccacgagtatctgaaggcctttaaggtggcctacagcctgaacggccacgagttc |
| | | gacttcatccacgacgtgaacaagaagcacaaagagtttgtcggcaactggaacaagaacgccgtgcacgtga |
| | | acctgttcgagacacctgtggaagcccagtacgtgcggctgtaccctacaagctgtcacaccgcctgcactctga |
| | | gattcgaactgctgggatgcgagctgaacggctgtgctaatcctctgggcctgaagaacaacagcatccccgata |
| | | agcagatcaccgccagctccagctataagacatggggcctgcacctgttcagctggaacccttcttacgccagac |
| | | tggacaagcagggcaacttcaatgcttgggtggccggcagctacggcaatgatcagtggctgcaagtggacctg |
| | | ggcagcagcaaagaagtgacaggcatcatcacccagggcgccagaaatttcggcagcgtgcagtttgtggcca |
| | | gctacaaagtggcctactccaacgacagcgccaactggaccgagtatcaggaccctagaaccggcagctcca |
| | | agatcttccccggcaattgggacaaccacagccacaagaagaatctgttcgaaacccctatcctggccagatatg |
| | | tgcgcattctgcccgtggcctggcacaacagaattgccctgagactggaactgctcggctgc |
| 58 | FP816 | LDICSKNPCHNGGLCEEISQEVRGDVFPSYTCTCLKGYAGNHCETKDAHKSEVA |
| | | HRFKDLGEENFKALVLIAFAQYLQQSPFEDHVKLVNEVTEFAKTCVADESAENCD |
| | | KSLHTLFGDKLCTVATLRETYGEMADCCAKQEPERNECFLQHKDDNPNLPRLVR |
| | | PEVDVMCTAFHDNEETFLKKYLYEIARRHPYFYAPELLFFAKRYKAAFTECCQAA |
| | | DKAACLLPKLDELRDEGKASSAKQRLKCASLQKFGERAFKAWAVARLSQRFPKA |
| | | EFAEVSKLVTDLTKVHTECCHGDLLECADDRADLAKYICENQDSISSKLKECCEK |
| | | PLLEKSHCIAEVENDEMPADLPSLAADFVESKDVCKNYAEAKDVFLGMFLYEYAR |
| | | RHPDYSVVLLLRLAKTYETTLEKCCAAADPHECYAKVFDEFKPLVEEPQNLIKQN |
| | | CELFEQLGEYKFQNALLVRYTKKVPQVSTPTLVEVSRNLGKVGSKCCKHPEAKR |
| | | MPCAEDYLSVVLNQLCVLHEKTPVSDRVTKCCTESLVNRRPCFSALEVDETYVP |
| | | KEFNAETFTFHADICTLSEKERQIKKQTALVELVKHKPKATKEQLKAVMDDFAAFV |
| | | EKCCKADDKETCFAEEGKKLVAASQAALGLCVEPLGMENGNIANSQIAASSVRV |
| | | TFLGLQHWVPELARLNRAGMVNAWTPSSNDDNPWIQVNLLRRMWVTGVVTQG |
| | | ASRLASHEYLKAFKVAYSLNGHEFDFIHDVNKKHKEFVGNWNKNAVHVNLFETP |
| | | VEAQYVRLYPTSCHTACTLRFELLGCELNGCANPLGLKNNSIPDKQITASSSYKT |
| | | WGLHLFSWNPSYARLDKQGNFNAWVAGSYGNDQWLQVDLGSSKEVTGIITQG |
| | | ARNFGSVQFVASYKVAYSNDSANWTEYQDPRTGSSKIFPGNWDNHSHKKNLFE |
| | | TPILARYVRILPVAWHNRIALRLELLGC |
| 59 | FP816 | ctggacatctgcagcaagaatccttgccacaacggcggcctgtgcgaagagatttctcaagaagtgcggggcga |
| | nucleic acid | cgttttccccagctacacctgtacatgtctgaagggctacgccggcaaccactgcgagacaaaggatgcccaca |
| | | agagcgaggtggcccacagattcaaggatctgggcgaagagaacttcaaggccctggtgctgatcgccttcgct |
| | | cagtatctccagcagagccctttcgaggaccacgtgaagctggtcaacgaagtgaccgagttcgccaagacctg |
| | | tgtggccgatgagagcgccgagaactgtgataagagcctgcacaccctgttcggcgacaagctgtgtacagtgg |
| | | ccacactgagagaaacctacggcgagatggccgactgctgtgccaagcaagagcccgagagaaacgagtgc |
| | | ttcctgcagcacaaggacgacaaccccaacctgcctagactcgtgcgacccgaagtggatgtgatgtgcaccgcc |
| | | tttcacgacaacgaggaaaccttcctgaagaagtacctgtacgagatcgccagacggcacccctacttttatgcc |
| | | cctgagctgctgttcttcgccaagcggtataaggccgccttcaccgaatgttgccaggccgctgataaggctgcc |
| | | tgtctgctgcctaagctggacgagctgagagatgagggcaaagccagctctgccaagcagagactgaagtgcgcc |
| | | agcctgcagaagttcggcgagagagcttttaaggcctgggccgttgccagactgagccagagatttcctaaggcc |
| | | gagtttgccgaggtgtccaagctcgtgaccgatctgacaaaggtgcacaccgagtgctgtcacggcgatctgctg |
| | | gaatgtgccgacgatagagccgacctggccaagtacatctgcgagaaccaggacagcatcagcagcaagctg |
| | | aaagagtgctgcgagaagcccctgctggaaaagtctcactgtatcgccgaggtggaaaacgacgagatgcctg |
| | | ccgatctgcctagcctggctgccgatttcgtggaaagcaaggacgtgtgcaagaactacgccgaggccaaggatgt |
| | | gtttctgggcatgtttctgtatgagtacgcccgcagacaccccgactattctgtggttctgctgctgcggctggc |
| | | caaaacctacgagacaaccctggaaaaatgctgcgccgctgccgatcctcacgagtgttatgccaaggtgttcg |
| | | acgagttcaagcctctggtggaagaaccccagaacctgatcaagcagaactgcgagctgttcgagcagctgggcg |
| | | agtacaagttccagaatgccctgctcgtgcggtacaccaagaaagtgcctcaggtgtccacacctacactggttg |
| | | aggtgtcccggaatctgggcaaagtgggcagcaagtgttgcaagcaccctgaggccaagagaatgccttgcgc |
| | | cgaggattacctgagcgtggtgctgaatcagctgtgcgtgctgcacgagaaaacccctgtgtccgacagagtgac |
| | | caagtgctgtaccgagagcctcgtgaacagaaggccttgctttagcgccctggaagtggacgagacatacgtgc |
| | | ccaaagagttcaacgccgagacattcaccttccacgccgacatctgtaccctgagcgagaaagagcggcagat |
| | | caagaagcagacagccctggtcgagctggttaagcacaagcccaaggccaccaaagaacagctgaaggcc |
| | | gtgatggacgacttcgccgcctttgtcgagaagtgctgcaaggccgacgacaaagagacatgcttcgccgaaga |
| | | gggcaagaaactggtggctgcttctcaggctgccctgggactgtgtgtggaacccctcggcatggaaaacggca |
| | | atatcgccaatagccagattgccgccagcagcgtcagagtgacatttctgggactgcagcactgggtgcccgag |
| | | ctggctagactgaatagagccggcatggtcaacgcctggacacccagcagcaacgacgataatccctggatcc |
| | | aagtgaacctgctgcggcgtatgtgggtcacaggtgttgttacacagggcgcctctagactggccagccacgagt |
| | | atctgaaggcctttaaggtggcctacagcctgaacggccacgagttcgacttcatccacgacgtgaacaagaag |
| | | cacaaagagtttgtcggcaactggaacaagaacgccgtgcacgtgaacctgttcgagacacctgtggaagccc |
| | | agtacgtgcggctgtaccctacaagctgtcacaccgcctgcactctgagattcgaactgctgggatgcgagctga |
| | | acggctgtgctaatcctctgggcctgaagaacaacagcatccccgataagcagatcaccgccagctccagctat |
| | | aagacatggggcctgcacctgttcagctggaacccttcttacgccagactggacaagcagggcaacttcaatgct |
| | | tgggtggccggcagctacggcaatgatcagtggctgcaagtggacctgggcagcagcaaagaagtgacaggc |
| | | atcatcacccagggcgccagaaatttcggcagcgtgcagtttgtggccagctacaaagtggcctactccaacgac |
| | | agcgccaactggaccgagtaccaggatcctagaaccggcagctccaagatcttccccggcaattgggacaacc |
| | | acagccacaagaagaatctgttcgaaacccctatcctggccagatatgtgcggattctgcccgtggcctggcaca |
| | | acagaattgccctgagactggaactgctcggctgt |
| 62 | (G2S)4 linker | GGSGGSGGSGGS |
| 63 | (GS)₄ linker | GSGSGSGS |
| 64 | G4S linker | GGGGS |
| 65 | (G4S)2 linker | GGGGSGGGGS |
| 66 | GS His-tag | GSHHHHHH |
| 67 | His-tag | HHHHHH |
| 68 | Murine MFG-E8 | MQVSRVLAALCGMLLCASGLFAASGDFCDSSLCLNGGTCLTGQDNDIYCLCPEG |
| | | FTGLVCNETERGPCSPNPCYNDAKCLVTLDTQRGDIFTEYICQCPVGYSGIHCET |
| | | ETNYYNLDGEYMFTTAVPNTAVPTPAPTPDLSNNLASRCSTQLGMEGGAIADSQ |
| | | ISASSVYMGFMGLQRWGPELARLYRTGIVNAWTASNYDSKPWIQVNLLRKMRV |
| | | SGVMTQGASRAGRAEYLKTFKVAYSLDGRKFEFIQDESGGDKEFLGNLDNNSLK |
| | | VNMFNPTLEAQYIKLYPVSCHRGCTLRFELLGCELHGCSEPLGLKNNTIPDSQMS |
| | | ASSSYKTWNLRAFGWYPHLGRLDNQGKINAWTAQSNSAKEWLQVDLGTQRQV |
| | | TGHTQGARDFGHIQYVASYKVAHSDDGVQWTVYEEQGSSKVFQGNLDNNSHK |
| | | KNIFEKPFMARYVRVLPVSWHNRITLRLELLGC |
| 69 | FP1776 | DICDPNPCENGGICLPGLADGSFSCECPDGFTDPNCSSWEVASDEEEPTSAGP |
| | | CTPNPCHNGGTCEISEAYRGDTFIGYVCKCPRGFNGIHCQHNINECEVEPCKNG |
| | | GICTDLVANYSCECPGEFMGRNCQYKDAHKSEVAHRFKDLGEENFKALVLIAFA |
| | | QYLQQSPFEDHVKLVNEVTEFAKTCVADESAENCDKSLHTLFGDKLCTVATLRE |
| | | TYGEMADCCAKQEPERNECFLQHKDDNPNLPRLVRPEVDVMCTAFHDNEETFL |
| | | KKYLYEIARRHPYFYAPELLFFAKRYKAAFTECCQAADKAACLLPKLDELRDEGK |
| | | ASSAKQRLKCASLQKFGERAFKAWAVARLSQRFPKAEFAEVSKLVTDLTKVHTE |
| | | CCHGDLLECADDRADLAKYICENQDSISSKLKECCEKPLLEKSHCIAEVENDEMP |
| | | ADLPSLAADFVESKDVCKNYAEAKDVFLGMFLYEYARRHPDYSVVLLLRLAKTYE |
| | | TTLEKCCAAADPHECYAKVFDEFKPLVEEPQNLIKQNCELFEQLGEYKFQNALLV |
| | | RYTKKVPQVSTPTLVEVSRNLGKVGSKCCKHPEAKRMPCAEDYLSVVLNQLCVL |
| | | HEKTPVSDRVTKCCTESLVNRRPCFSALEVDETYVPKEFNAETFTFHADICTLSE |
| | | KERQIKKQTALVELVKHKPKATKEQLKAVMDDFAAFVEKCCKADDKETCFAEEG |
| | | KKLVACSGPLGIEGGIISNQQITASSTHRALFGLQKWYPYYARLNKKGLINAWTAA |
| | | ENDRWPWIQINLQRKMRVTGVITQGAKRIGSPEYIKSYKIAYSNDGKTWAMYKVK |
| | | GTNEDMVFRGNIDNNTPYANSFTPPIKAQYVRLYPQVCRRHCTLRMELLGCELS |
| | | GCSEPLGMKSGHIQDYQITASSIFRTLNMDMFTWEPRKARLDKQGKVNAWTSG |
| | | HNDQSQWLQVDLLVPTKVTGIITQGAKDFGHVQFVGSYKLAYSNDGEHWTVYQ |
| | | DEKQRKDKVFQGNFDNDTHRKNVIDPPIYARHIRILPWSWYGRITLRSELLGC |
| 70 | FP1068 | DICDPNPCENGGICLPGLADGSFSCECPDGFTDPNCSSWEVASDEEEPTSAGP |
| | | CTPNPCHNGGTCEISEAYRGDTFIGYVCKCPRGFNGIHCQHNINECEVEPCKNG |
| | | GICTDLVANYSCECPGEFMGRNCQYKDAHKSEVAHRFKDLGEENFKALVLIAFA |
| | | QYLQQSPFEDHVKLVNEVTEFAKTCVADESAENCDKSLHTLFGDKLCTVATLRE |
| | | TYGEMADCCAKQEPERNECFLQHKDDNPNLPRLVRPEVDVMCTAFHDNEETFL |
| | | KKYLYEIARRHPYFYAPELLFFAKRYKAAFTECCQAADKAACLLPKLDELRDEGK |
| | | ASSAKQRLKCASLQKFGERAFKAWAVARLSQRFPKAEFAEVSKLVTDLTKVHTE |
| | | CCHGDLLECADDRADLAKYICENQDSISSKLKECCEKPLLEKSHCIAEVENDEMP |
| | | ADLPSLAADFVESKDVCKNYAEAKDVFLGMFLYEYARRHPDYSVVLLLRLAKTYE |
| | | TTLEKCCAAADPHECYAKVFDEFKPLVEEPQNLIKQNCELFEQLGEYKFQNALLV |
| | | RYTKKVPQVSTPTLVEVSRNLGKVGSKCCKHPEAKRMPCAEDYLSVVLNQLCVL |
| | | HEKTPVSDRVTKCCTESLVNRRPCFSALEVDETYVPKEFNAETFTFHADICTLSE |
| | | KERQIKKQTALVELVKHKPKATKEQLKAVMDDFAAFVEKCCKADDKETCFAEEG |
| | | KKLVAASQAALCSGPLGIEGGIISNQQITASSTHRALFGLQKWYPYYARLNKKGLI |
| | | NAWTAAENDRWPWIQINLQRKMRVTGVITQGAKRIGSPEYIKSYKIAYSNDGKT |
| | | WAMYKVKGTNEDMVFRGNIDNNTPYANSFTPPIKAQYVRLYPQVCRRHCTLRM |
| | | ELLGCELSGCSEPLGMKSGHIQDYQITASSIFRTLNMDMFTWEPRKARLDKQGK |
| | | VNAWTSGHNDQSQWLQVDLLVPTKVTGIITQGAKDFGHVQFVGSYKLAYSNDG |
| | | EHWTVYQDEKQRKDKVFQGNFDNDTHRKNVIDPPIYARHIRILPWSWYGRITLRS |
| | | ELLGC |
| 71 | FP1777 | DICDPNPCENGGICLPGLADGSFSCECPDGFTDPNCSSWEVASDEEEPTSAGP |
| = 133 | | CTPNPCHNGGTCEISEAYRGDTFIGYVCKCPRGFNGIHCQHNINECEVEPCKNG |
| | | GICTDLVANYSCECPGEFMGRNCQYKDAHKSEVAHRFKDLGEENFKALVLIAFA |
| | | QYLQQSPFEDHVKLVNEVTEFAKTCVADESAENCDKSLHTLFGDKLCTVATLRE |
| | | TYGEMADCCAKQEPERNECFLQHKDDNPNLPRLVRPEVDVMCTAFHDNEETFL |
| | | KKYLYEIARRHPYFYAPELLFFAKRYKAAFTECCQAADKAACLLPKLDELRDEGK |
| | | ASSAKQRLKCASLQKFGERAFKAWAVARLSQRFPKAEFAEVSKLVTDLTKVHTE |
| | | CCHGDLLECADDRADLAKYICENQDSISSKLKECCEKPLLEKSHCIAEVENDEMP |
| | | ADLPSLAADFVESKDVCKNYAEAKDVFLGMFLYEYARRHPDYSVVLLLRLAKTYE |
| | | TTLEKCCAAADPHECYAKVFDEFKPLVEEPQNLIKQNCELFEQLGEYKFQNALLV |
| | | RYTKKVPQVSTPTLVEVSRNLGKVGSKCCKHPEAKRMPCAEDYLSVVLNQLCVL |
| | | HEKTPVSDRVTKCCTESLVNRRPCFSALEVDETYVPKEFNAETFTFHADICTLSE |
| | | KERQIKKQTALVELVKHKPKATKEQLKAVMDDFAAFVEKCCKADDKETCFAEEG |
| | | KKLVACSGPLGIEGGIISNQQITASSTHRALFGLQKWYPYYARLNKKGLINAWTAA |
| | | ENDRWPWIQINLQRKMRVTGVITQGAKRIGSPEYIKSYKIAYSNDGKTWAMYKVK |
| | | GTNEDMVFRGNIDNNTPYANSFTPPIKAQYVRLYPQVCRRHCTLRMELLGCELS |
| | | G |
| 72 | FP1069 | DICDPNPCENGGICLPGLADGSFSCECPDGFTDPNCSSWEVASDEEEPTSAGP |
| | | CTPNPCHNGGTCEISEAYRGDTFIGYVCKCPRGFNGIHCQHNINECEVEPCKNG |
| | | GICTDLVANYSCECPGEFMGRNCQYKDAHKSEVAHRFKDLGEENFKALVLIAFA |
| | | QYLQQSPFEDHVKLVNEVTEFAKTCVADESAENCDKSLHTLFGDKLCTVATLRE |
| | | TYGEMADCCAKQEPERNECFLQHKDDNPNLPRLVRPEVDVMCTAFHDNEETFL |
| | | KKYLYEIARRHPYFYAPELLFFAKRYKAAFTECCQAADKAACLLPKLDELRDEGK |
| | | ASSAKQRLKCASLQKFGERAFKAWAVARLSQRFPKAEFAEVSKLVTDLTKVHTE |
| | | CCHGDLLECADDRADLAKYICENQDSISSKLKECCEKPLLEKSHCIAEVENDEMP |
| | | ADLPSLAADFVESKDVCKNYAEAKDVFLGMFLYEYARRHPDYSVVLLLRLAKTYE |
| | | TTLEKCCAAADPHECYAKVFDEFKPLVEEPQNLIKQNCELFEQLGEYKFQNALLV |
| | | RYTKKVPQVSTPTLVEVSRNLGKVGSKCCKHPEAKRMPCAEDYLSVVLNQLCVL |
| | | HEKTPVSDRVTKCCTESLVNRRPCFSALEVDETYVPKEFNAETFTFHADICTLSE |
| | | KERQIKKQTALVELVKHKPKATKEQLKAVMDDFAAFVEKCCKADDKETCFAEEG |
| | | KKLVAASQAALCSGPLGIEGGIISNQQITASSTHRALFGLQKWYPYYARLNKKGLI |
| | | NAWTAAENDRWPWIQINLQRKMRVTGVITQGAKRIGSPEYIKSYKIAYSNDGKT |
| | | WAMYKVKGTNEDMVFRGNIDNNTPYANSFTPPIKAQYVRLYPQVCRRHCTLRM |
| | | ELLGCELSG |
| 73 | FP261 | LDICSKNPCHNGGLCEEISQEVRGDVFPSYTCTCLKGYAGNHCETKDAHKSEVA |
| = 121 | | HRFKDLGEENFKALVLIAFAQYLQQSPFEDHVKLVNEVTEFAKTCVADESAENCD |
| | | KSLHTLFGDKLCTVATLRETYGEMADCCAKQEPERNECFLQHKDDNPNLPRLVR |
| | | PEVDVMCTAFHDNEETFLKKYLYEIARRHPYFYAPELLFFAKRYKAAFTECCQAA |
| | | DKAACLLPKLDELRDEGKASSAKQRLKCASLQKFGERAFKAWAVARLSQRFPKA |
| | | EFAEVSKLVTDLTKVHTECCHGDLLECADDRADLAKYICENQDSISSKLKECCEK |
| | | PLLEKSHCIAEVENDEMPADLPSLAADFVESKDVCKNYAEAKDVFLGMFLYEYAR |
| | | RHPDYSVVLLLRLAKTYETTLEKCCAAADPHECYAKVFDEFKPLVEEPQNLIKQN |
| | | CELFEQLGEYKFQNALLVRYTKKVPQVSTPTLVEVSRNLGKVGSKCCKHPEAKR |
| | | MPCAEDYLSVVLNQLCVLHEKTPVSDRVTKCCTESLVNRRPCFSALEVDETYVP |
| | | KEFNAETFTFHADICTLSEKERQIKKQTALVELVKHKPKATKEQLKAVMDDFAAFV |
| | | EKCCKADDKETCFAEEGKKLVACVEPLGMENGNIANSQIAASSVRVTFLGLQHW |
| | | VPELARLNRAGMVNAWTPSSNDDNPWIQVNLLRRMWVTGVVTQGASRLASHE |
| | | YLKAFKVAYSLNGHEFDFIHDVNKKHKEFVGNWNKNAVHVNLFETPVEAQYVRL |
| | | YPTSCHTACTLRFELLGCELNG |
| 74 | FP262 | LDICSKNPCHNGGLCEEISQEVRGDVFPSYTCTCLKGYAGNHCETKDAHKSEVA |
| = 119 | | HRFKDLGEENFKALVLIAFAQYLQQSPFEDHVKLVNEVTEFAKTCVADESAENCD |
| | | KSLHTLFGDKLCTVATLRETYGEMADCCAKQEPERNECFLQHKDDNPNLPRLVR |
| | | PEVDVMCTAFHDNEETFLKKYLYEIARRHPYFYAPELLFFAKRYKAAFTECCQAA |
| | | DKAACLLPKLDELRDEGKASSAKQRLKCASLQKFGERAFKAWAVARLSQRFPKA |
| | | EFAEVSKLVTDLTKVHTECCHGDLLECADDRADLAKYICENQDSISSKLKECCEK |
| | | PLLEKSHCIAEVENDEMPADLPSLAADFVESKDVCKNYAEAKDVFLGMFLYEYAR |
| | | RHPDYSVVLLLRLAKTYETTLEKCCAAADPHECYAKVFDEFKPLVEEPQNLIKQN |
| | | CELFEQLGEYKFQNALLVRYTKKVPQVSTPTLVEVSRNLGKVGSKCCKHPEAKR |
| | | MPCAEDYLSVVLNQLCVLHEKTPVSDRVTKCCTESLVNRRPCFSALEVDETYVP |
| | | KEFNAETFTFHADICTLSEKERQIKKQTALVELVKHKPKATKEQLKAVMDDFAAFV |
| | | EKCCKADDKETCFAEEGKKLVAASQAALCVEPLGMENGNIANSQIAASSVRVTFL |
| | | GLQHWVPELARLNRAGMVNAWTPSSNDDNPWIQVNLLRRMWVTGVVTQGASR |
| | | LASHEYLKAFKVAYSLNGHEFDFIHDVNKKHKEFVGNWNKNAVHVNLFETPVEA |
| | | QYVRLYPTSCHTACTLRFELLGCELNG |
| 75 | Full lenght | MPRPRLLAALCGALLCAPSLLVALDICSKNPCHNGGLCEEISQEVRGDVFPSYTC |
| | MFG-E8 [L76M] | TCLKGYAGNHCETKCVEPLGMENGNIANSQIAASSVRVTFLGLQHWVPELARLN |
| | | RAGMVNAWTPSSNDDNPWIQVNLLRRMWVTGVVTQGASRLASHEYLKAFKVA |
| | | YSLNGHEFDFIHDVNKKHKEFVGNWNKNAVHVNLFETPVEAQYVRLYPTSCHTA |
| | | CTLRFELLGCELNGCANPLGLKNNSIPDKQITASSSYKTWGLHLFSWNPSYARLD |
| | | KQGNFNAWVAGSYGNDQWLQVDLGSSKEVTGIITQGARNFGSVQFVASYKVAY |
| | | SNDSANWTEYQDPRTGSSKIFPGNWDNHSHKKNLFETPILARYVRILPVAWHNR |
| | | IALRLELLGC |
| 76 | PS binding | CVEPLGMENGNIANSQIAASSVRVTFLGLQHWVPELARLNRAGMVNAWTPSSN |
| | domain MFG-E8 | DDNPWIQVNLLRRMWVTGVVTQGASRLASHEYLKAFKVAYSLNGHEFDFIHDVN |
| | with [L76M] | KKHKEFVGNWNKNAVHVNLFETPVEAQYVRLYPTSCHTACTLRFELLGCELNGC |
| | | ANPLGLKNNSIPDKQITASSSYKTWGLHLFSWNPSYARLDKQGNFNAWVAGSY |
| | | GNDQWLQVDLGSSKEVTGIITQGARNFGSVQFVASYKVAYSNDSANWTEYQDP |
| | | RTGSSKIFPGNWDNHSHKKNLFETPILARYVRILPVAWHNRIALRLELLGC |
| 77 | EGF binding | DICDPNPCENGGICLPGLADGSFSCECPDGFTDPNCSSWEVASDEEEPTSAGP |
| | domain EDIL-3 | CTPNPCHNGGTCEISEAYRGDTFIGYVCKCPRGFNGIHCQHNINECEVEPCKNG |
| | (EGF-like | GICTDLVANYSCECPGEFMGRNCQYK |
| | domains 1-2-3) | |
| 96 | EGF binding | DICDPNPCENGGICLPGLADGSFSCECPDGFTDPNCSSWEVASDEEEPT |
| | domain EDIL-3 | |
| | (EGF-like | |
| | domain 1) | |
| 97 | EGF binding | SAGPCTPNPCHNGGTCEISEAYRGDTFIGYVCKCPRGFNGIHCQH |
| | domain EDIL-3 | |
| | (EGF-like | |
| | domain 2) | |
| 98 | EGF binding | NINECEVEPCKNGGICTDLVANYSCECPGEFMGRNCQYK |
| | domain EDIL-3 | |
| | (EGF-like | |
| | domain 3) | |
| 99 | EGF binding | DICDPNPCENGGICLPGLADGSFSCECPDGFTDPNCSSWEVASDEEEPTSAGP |
| | domain EDIL-3 | CTPNPCHNGGTCEISEAYRGDTFIGYVCKCPRGFNGIHCQH |
| | (EGF-like | |
| | domains 1 and | |
| | 2) | |
| 100 | EGF binding | SAGPCTPNPCHNGGTCEISEAYRGDTFIGYVCKCPRGFNGIHCQHNINECEVEP |
| | domain EDIL-3 | CKNGGICTDLVANYSCECPGEFMGRNCQYK |
| | (EGF-like | |
| | domain 2 and 3) | |
| 101 | EGF binding | DICDPNPCENGGICLPGLADGSFSCECPDGFTDPNCSSVVEVASDEEEPTNINE |
| | domain EDIL-3 | CEVEPCKNGGICTDLVANYSCECPGEFMGRNCQYK |
| | (EGF-like | |
| | domain 1 and 3) | |
| 78 | PS binding | CSGPLGIEGGIISNQQITASSTHRALFGLQKWYPYYARLNKKGLINAWTAAENDR |
| | domain EDIL-3 | WPWIQINLQRKMRVTGVITQGAKRIGSPEYIKSYKIAYSNDGKTWAMYKVKGTNE |
| | | DMVFRGNIDNNTPYANSFTPPIKAQYVRLYPQVCRRHCTLRMELLGCELSGCSE |
| | | PLGMKSGHIQDYQITASSIFRTLNMDMFTWEPRKARLDKQGKVNAWTSGHNDQ |
| | | SQWLQVDLLVPTKVTGIITQGAKDFGHVQFVGSYKLAYSNDGEHWTVYQDEKQ |
| | | RKDKVFQGNFDNDTHRKNVIDPPIYARHIRILPWSWYGRITLRSELLGCTEEE |
| 79 | PS binding | CSGPLGIEGGIISNQQITASSTHRALFGLQKWYPYYARLNKKGLINAWTAAENDR |
| | domain EDIL-3 | WPWIQINLQRKMRVTGVITQGAKRIGSPEYIKSYKIAYSNDGKTWAMYKVKGTNE |
| | TEEE truncated | DMVFRGNIDNNTPYANSFTPPIKAQYVRLYPQVCRRHCTLRMELLGCELSGCSE |
| | | PLGMKSGHIQDYQITASSIFRTLNMDMFTWEPRKARLDKQGKVNAWTSGHNDQ |
| | | SQWLQVDLLVPTKVTGIITQGAKDFGHVQFVGSYKLAYSNDGEHWTVYQDEKQ |
| | | RKDKVFQGNFDNDTHRKNVIDPPIYARHIRILPWSWYGRITLRSELLGC |
| 80 | EGF-like | DICDPNPCENGGICLPGLADGSFSCECPDGFTDPNCSSWEVASDEEEPTSAGP |
| | domain 1-2-3 | CTPNPCHNGGTCEISEAYRGDTFIGYVCKCPRGFNGIHCQHNINECEVEPCKNG |
| | [EDIL3]_HSA[A | GICTDLVANYSCECPGEFMGRNCQYKDAHKSEVAHRFKDLGEENFKALVLIAFA |
| | 626- | QYLQQSPFEDHVKLVNEVTEFAKTCVADESAENCDKSLHTLFGDKLCTVATLRE |
| | L633]removed_ | TYGEMADCCAKQEPERNECFLQHKDDNPNLPRLVRPEVDVMCTAFHDNEETFL |
| | C1_C2[MFG- | KKYLYEIARRHPYFYAPELLFFAKRYKAAFTECCQAADKAACLLPKLDELRDEGK |
| | E8] | ASSAKQRLKCASLQKFGERAFKAWAVARLSQRFPKAEFAEVSKLVTDLTKVHTE |
| | Non-M 3163 | CCHGDLLECADDRADLAKYICENQDSISSKLKECCEKPLLEKSHCIAEVENDEMP |
| | | ADLPSLAADFVESKDVCKNYAEAKDVFLGMFLYEYARRHPDYSVVLLLRLAKTYE |
| | | TTLEKCCAAADPHECYAKVFDEFKPLVEEPQNLIKQNCELFEQLGEYKFQNALLV |
| | | RYTKKVPQVSTPTLVEVSRNLGKVGSKCCKHPEAKRMPCAEDYLSVVLNQLCVL |
| | | HEKTPVSDRVTKCCTESLVNRRPCFSALEVDETYVPKEFNAETFTFHADICTLSE |
| | | KERQIKKQTALVELVKHKPKATKEQLKAVMDDFAAFVEKCCKADDKETCFAEEG |
| | | KKLVACVEPLGMENGNIANSQIAASSVRVTFLGLQHWVPELARLNRAGMVNAWT |
| | | PSSNDDNPWIQVNLLRRMWVTGVVTQGASRLASHEYLKAFKVAYSLNGHEFDFI |
| | | HDVNKKHKEFVGNWNKNAVHVNLFETPVEAQYVRLYPTSCHTACTLRFELLGCE |
| | | LNGCANPLGLKNNSIPDKQITASSSYKTWGLHLFSWNPSYARLDKQGNFNAWVA |
| | | GSYGNDQWLQVDLGSSKEVTGIITQGARNFGSVQFVASYKVAYSNDSANWTEY |
| | | QDPRTGSSKIFPGNWDNHSHKKNLFETPILARYVRILPVAWHNRIALRLELLGC |
| 102 | EGF-like | DICDPNPCENGGICLPGLADGSFSCECPDGFTDPNCSSVVEVASDEEEPTDAHK |
| | domain | SEVAHRFKDLGEENFKALVLIAFAQYLQQSPFEDHVKLVNEVTEFAKTCVADESA |
| | 1 [EDIL3]_HSA[ | ENCDKSLHTLFGDKLCTVATLRETYGEMADCCAKQEPERNECFLQHKDDNPNL |
| | A626- | PRLVRPEVDVMCTAFHDNEETFLKKYLYEIARRHPYFYAPELLFFAKRYKAAFTE |
| | L633]removed_ | CCQAADKAACLLPKLDELRDEGKASSAKQRLKCASLQKFGERAFKAWAVARLS |
| | C1_C2[MFG- | QRFPKAEFAEVSKLVTDLTKVHTECCHGDLLECADDRADLAKYICENQDSISSKL |
| | E8] | KECCEKPLLEKSHCIAEVENDEMPADLPSLAADFVESKDVCKNYAEAKDVFLGM |
| | | FLYEYARRHPDYSVVLLLRLAKTYETTLEKCCAAADPHECYAKVFDEFKPLVEEP |
| | | QNLIKQNCELFEQLGEYKFQNALLVRYTKKVPQVSTPTLVEVSRNLGKVGSKCC |
| | | KHPEAKRMPCAEDYLSVVLNQLCVLHEKTPVSDRVTKCCTESLVNRRPCFSALE |
| | | VDETYVPKEFNAETFTFHADICTLSEKERQIKKQTALVELVKHKPKATKEQLKAVM |
| | | DDFAAFVEKCCKADDKETCFAEEGKKLVACVEPLGMENGNIANSQIAASSVRVT |
| | | FLGLQHWVPELARLNRAGMVNAWTPSSNDDNPWIQVNLLRRMWVTGVVTQGA |
| | | SRLASHEYLKAFKVAYSLNGHEFDFIHDVNKKHKEFVGNWNKNAVHVNLFETPV |
| | | EAQYVRLYPTSCHTACTLRFELLGCELNGCANPLGLKNNSIPDKQITASSSYKTW |
| | | GLHLFSWNPSYARLDKQGNFNAWVAGSYGNDQWLQVDLGSSKEVTGIITQGAR |
| | | NFGSVQFVASYKVAYSNDSANWTEYQDPRTGSSKIFPGNWDNHSHKKNLFETPI |
| | | LARYVRILPVAWHNRIALRLELLGC |
| 103 | EGF-like | SAGPCTPNPCHNGGTCEISEAYRGDTFIGYVCKCPRGFNGIHCQHDAHKSEVAH |
| | domain | RFKDLGEENFKALVLIAFAQYLQQSPFEDHVKLVNEVTEFAKTCVADESAENCDK |
| | 2[EDIL3]_HSA[ | SLHTLFGDKLCTVATLRETYGEMADCCAKQEPERNECFLQHKDDNPNLPRLVRP |
| | A626- | EVDVMCTAFHDNEETFLKKYLYEIARRHPYFYAPELLFFAKRYKAAFTECCQAAD |
| | L633]removed_ | KAACLLPKLDELRDEGKASSAKQRLKCASLQKFGERAFKAWAVARLSQRFPKAE |
| | C1_C2[MFG- | FAEVSKLVTDLTKVHTECCHGDLLECADDRADLAKYICENQDSISSKLKECCEKP |
| | E8] | LLEKSHCIAEVENDEMPADLPSLAADFVESKDVCKNYAEAKDVFLGMFLYEYAR |
| | | RHPDYSVVLLLRLAKTYETTLEKCCAAADPHECYAKVFDEFKPLVEEPQNLIKQN |
| | | CELFEQLGEYKFQNALLVRYTKKVPQVSTPTLVEVSRNLGKVGSKCCKHPEAKR |
| | | MPCAEDYLSVVLNQLCVLHEKTPVSDRVTKCCTESLVNRRPCFSALEVDETYVP |
| | | KEFNAETFTFHADICTLSEKERQIKKQTALVELVKHKPKATKEQLKAVMDDFAAFV |
| | | EKCCKADDKETCFAEEGKKLVACVEPLGMENGNIANSQIAASSVRVTFLGLQHW |
| | | VPELARLNRAGMVNAWTPSSNDDNPWIQVNLLRRMWVTGVVTQGASRLASHE |
| | | YLKAFKVAYSLNGHEFDFIHDVNKKHKEFVGNWNKNAVHVNLFETPVEAQYVRL |
| | | YPTSCHTACTLRFELLGCELNGCANPLGLKNNSIPDKQITASSSYKTWGLHLFSW |
| | | NPSYARLDKQGNFNAWVAGSYGNDQWLQVDLGSSKEVTGIITQGARNFGSVQF |
| | | VASYKVAYSNDSANWTEYQDPRTGSSKIFPGNWDNHSHKKNLFETPILARYVRIL |
| | | PVAWHNRIALRLELLGC |
| 104 | EGF-like | NINECEVEPCKNGGICTDLVANYSCECPGEFMGRNCQYKDAHKSEVAHRFKDL |
| | domain | GEENFKALVLIAFAQYLQQSPFEDHVKLVNEVTEFAKTCVADESAENCDKSLHTL |
| | 3[EDIL3]_HSA[ | FGDKLCTVATLRETYGEMADCCAKQEPERNECFLQHKDDNPNLPRLVRPEVDV |
| | A626- | MCTAFHDNEETFLKKYLYEIARRHPYFYAPELLFFAKRYKAAFTECCQAADKAAC |
| | L633]removed_ | LLPKLDELRDEGKASSAKQRLKCASLQKFGERAFKAWAVARLSQRFPKAEFAEV |
| | C1_C2[MFG- | SKLVTDLTKVHTECCHGDLLECADDRADLAKYICENQDSISSKLKECCEKPLLEK |
| | E8] | SHCIAEVENDEMPADLPSLAADFVESKDVCKNYAEAKDVFLGMFLYEYARRHPD |
| | | YSVVLLLRLAKTYETTLEKCCAAADPHECYAKVFDEFKPLVEEPQNLIKQNCELFE |
| | | QLGEYKFQNALLVRYTKKVPQVSTPTLVEVSRNLGKVGSKCCKHPEAKRMPCA |
| | | EDYLSVVLNQLCVLHEKTPVSDRVTKCCTESLVNRRPCFSALEVDETYVPKEFN |
| | | AETFTFHADICTLSEKERQIKKQTALVELVKHKPKATKEQLKAVMDDFAAFVEKC |
| | | CKADDKETCFAEEGKKLVACVEPLGMENGNIANSQIAASSVRVTFLGLQHWVPE |
| | | LARLNRAGMVNAWTPSSNDDNPWIQVNLLRRMWVTGVVTQGASRLASHEYLK |
| | | AFKVAYSLNGHEFDFIHDVNKKHKEFVGNWNKNAVHVNLFETPVEAQYVRLYPT |
| | | SCHTACTLRFELLGCELNGCANPLGLKNNSIPDKQITASSSYKTWGLHLFSWNPS |
| | | YARLDKQGNFNAWVAGSYGNDQWLQVDLGSSKEVTGIITQGARNFGSVQFVAS |
| | | YKVAYSNDSANWTEYQDPRTGSSKIFPGNWDNHSHKKNLFETPILARYVRILPVA |
| | | WHNRIALRLELLGC |
| 105 | EGF-like | DICDPNPCENGGICLPGLADGSFSCECPDGFTDPNCSSWEVASDEEEPTSAGP |
| | domain 1- | CTPNPCHNGGTCEISEAYRGDTFIGYVCKCPRGFNGIHCQHDAHKSEVAHRFKD |
| | 2[EDIL3]_HSA[ | LGEENFKALVLIAFAQYLQQSPFEDHVKLVNEVTEFAKTCVADESAENCDKSLHT |
| | A626- | LFGDKLCTVATLRETYGEMADCCAKQEPERNECFLQHKDDNPNLPRLVRPEVD |
| | L633]removed_ | VMCTAFHDNEETFLKKYLYEIARRHPYFYAPELLFFAKRYKAAFTECCQAADKAA |
| | C1_C2[MFG- | CLLPKLDELRDEGKASSAKQRLKCASLQKFGERAFKAWAVARLSQRFPKAEFAE |
| | E8] | VSKLVTDLTKVHTECCHGDLLECADDRADLAKYICENQDSISSKLKECCEKPLLE |
| | | KSHCIAEVENDEMPADLPSLAADFVESKDVCKNYAEAKDVFLGMFLYEYARRHP |
| | | DYSVVLLLRLAKTYETTLEKCCAAADPHECYAKVFDEFKPLVEEPQNLIKQNCEL |
| | | FEQLGEYKFQNALLVRYTKKVPQVSTPTLVEVSRNLGKVGSKCCKHPEAKRMPC |
| | | AEDYLSVVLNQLCVLHEKTPVSDRVTKCCTESLVNRRPCFSALEVDETYVPKEF |
| | | NAETFTFHADICTLSEKERQIKKQTALVELVKHKPKATKEQLKAVMDDFAAFVEK |
| | | CCKADDKETCFAEEGKKLVACVEPLGMENGNIANSQIAASSVRVTFLGLQHWVP |
| | | ELARLNRAGMVNAWTPSSNDDNPWIQVNLLRRMWVTGVVTQGASRLASHEYL |
| | | KAFKVAYSLNGHEFDFIHDVNKKHKEFVGNWNKNAVHVNLFETPVEAQYVRLYP |
| | | TSCHTACTLRFELLGCELNGCANPLGLKNNSIPDKQITASSSYKTWGLHLFSWNP |
| | | SYARLDKQGNFNAWVAGSYGNDQWLQVDLGSSKEVTGIITQGARNFGSVQFVA |
| | | SYKVAYSNDSANWTEYQDPRTGSSKIFPGNWDNHSHKKNLFETPILARYVRILPV |
| | | AWHNRIALRLELLGC |
| 106 | EGF-like | SAGPCTPNPCHNGGTCEISEAYRGDTFIGYVCKCPRGFNGIHCQHNINECEVEP |
| | domain 2- | CKNGGICTDLVANYSCECPGEFMGRNCQYKDAHKSEVAHRFKDLGEENFKALV |
| | 3[EDIL3]_HSA[ | LIAFAQYLQQSPFEDHVKLVNEVTEFAKTCVADESAENCDKSLHTLFGDKLCTVA |
| | A626- | TLRETYGEMADCCAKQEPERNECFLQHKDDNPNLPRLVRPEVDVMCTAFHDNE |
| | L633]removed_ | ETFLKKYLYEIARRHPYFYAPELLFFAKRYKAAFTECCQAADKAACLLPKLDELRD |
| | C1_C2[MFG- | EGKASSAKQRLKCASLQKFGERAFKAWAVARLSQRFPKAEFAEVSKLVTDLTKV |
| | E8] | HTECCHGDLLECADDRADLAKYICENQDSISSKLKECCEKPLLEKSHCIAEVEND |
| | | EMPADLPSLAADFVESKDVCKNYAEAKDVFLGMFLYEYARRHPDYSVVLLLRLA |
| | | KTYETTLEKCCAAADPHECYAKVFDEFKPLVEEPQNLIKQNCELFEQLGEYKFQN |
| | | ALLVRYTKKVPQVSTPTLVEVSRNLGKVGSKCCKHPEAKRMPCAEDYLSVVLNQ |
| | | LCVLHEKTPVSDRVTKCCTESLVNRRPCFSALEVDETYVPKEFNAETFTFHADIC |
| | | TLSEKERQIKKQTALVELVKHKPKATKEQLKAVMDDFAAFVEKCCKADDKETCFA |
| | | EEGKKLVACVEPLGMENGNIANSQIAASSVRVTFLGLQHWVPELARLNRAGMVN |
| | | AWTPSSNDDNPWIQVNLLRRMWVTGVVTQGASRLASHEYLKAFKVAYSLNGHE |
| | | FDFIHDVNKKHKEFVGNWNKNAVHVNLFETPVEAQYVRLYPTSCHTACTLRFEL |
| | | LGCELNGCANPLGLKNNSIPDKQITASSSYKTWGLHLFSWNPSYARLDKQGNFN |
| | | AWVAGSYGNDQWLQVDLGSSKEVTGIITQGARNFGSVQFVASYKVAYSNDSAN |
| | | WTEYQDPRTGSSKIFPGNWDNHSHKKNLFETPILARYVRILPVAWHNRIALRLEL |
| | | LGC |
| 107 | EGF-like | DICDPNPCENGGICLPGLADGSFSCECPDGFTDPNCSSVVEVASDEEEPTNINE |
| | domain 1- | CEVEPCKNGGICTDLVANYSCECPGEFMGRNCQYKDAHKSEVAHRFKDLGEEN |
| | 3[EDIL3]_HSA[ | FKALVLIAFAQYLQQSPFEDHVKLVNEVTEFAKTCVADESAENCDKSLHTLFGDK |
| | A626- | LCTVATLRETYGEMADCCAKQEPERNECFLQHKDDNPNLPRLVRPEVDVMCTA |
| | L633]removed_ | FHDNEETFLKKYLYEIARRHPYFYAPELLFFAKRYKAAFTECCQAADKAACLLPKL |
| | C1_C2[MFG- | DELRDEGKASSAKQRLKCASLQKFGERAFKAWAVARLSQRFPKAEFAEVSKLVT |
| | E8] | DLTKVHTECCHGDLLECADDRADLAKYICENQDSISSKLKECCEKPLLEKSHCIAE |
| | | VENDEMPADLPSLAADFVESKDVCKNYAEAKDVFLGMFLYEYARRHPDYSWLL |
| | | LRLAKTYETTLEKCCAAADPHECYAKVFDEFKPLVEEPQNLIKQNCELFEQLGEY |
| | | KFQNALLVRYTKKVPQVSTPTLVEVSRNLGKVGSKCCKHPEAKRMPCAEDYLSV |
| | | VLNQLCVLHEKTPVSDRVTKCCTESLVNRRPCFSALEVDETYVPKEFNAETFTFH |
| | | ADICTLSEKERQIKKQTALVELVKHKPKATKEQLKAVMDDFAAFVEKCCKADDKE |
| | | TCFAEEGKKLVACVEPLGMENGNIANSQIAASSVRVTFLGLQHWVPELARLNRA |
| | | GMVNAWTPSSNDDNPWIQVNLLRRMWVTGVVTQGASRLASHEYLKAFKVAYSL |
| | | NGHEFDFIHDVNKKHKEFVGNWNKNAVHVNLFETPVEAQYVRLYPTSCHTACTL |
| | | RFELLGCELNGCANPLGLKNNSIPDKQITASSSYKTWGLHLFSWNPSYARLDKQ |
| | | GNFNAWVAGSYGNDQWLQVDLGSSKEVTGIITQGARNFGSVQFVASYKVAYSN |
| | | DSANWTEYQDPRTGSSKIFPGNWDNHSHKKNLFETPILARYVRILPVAWHNRIAL |
| | | RLELLGC |
| 81 | Nucleic acid of | gacatctgcgaccccaatccttgcgagaatggcggcatttgtctgcctggactggccgatggcagcttctcttgtga |
| | Seq ID NO: 80 | atgccccgatggcttcacagaccccaattgcagctctgtggtggaagtggccagcgacgaggaagaacctaca |
| | | agcgctggcccctgcacacccaatccatgtcataatggcggaacctgcgagatcagcgaggcctacagaggcg |
| | | ataccttcatcggctacgtgtgcaagtgccccagaggcttcaatggcatccactgccagcacaacatcaacgagt |
| | | gcgaggtggaaccatgcaagaacggcggcatctgtaccgacctggtggccaattactcttgcgagtgccctggc |
| | | gagttcatgggcagaaactgccagtacaaggacgcccacaagagcgaggtggcccacagattcaaggacctg |
| | | ggcgaagagaacttcaaggccctggtgctgatcgccttcgctcagtatctccagcagagccctttcgaggaccac |
| | | gtgaagctggtcaacgaagtgaccgagttcgccaagacctgtgtggccgatgagagcgccgagaactgtgaca |
| | | agagcctgcacacactgttcggcgacaagctgtgtaccgtggccacactgagagaaacctacggcgagatggc |
| | | cgactgctgtgccaagcaagagcccgagagaaacgagtgcttcctccagcacaaggatgacaaccccaacct |
| | | gcctagactcgtgcggcctgaagtggatgtgatgtgcaccgcctttcacgacaacgaggaaaccttcctgaagaa |
| | | gtacctgtacgagatcgccagacggcacccctacttttatgcccctgagctgctgttcttcgccaagcggtataagg |
| | | ccgccttcaccgaatgttgccaggccgctgataaggctgcctgtctgctgcctaagctggacgagctgagagatg |
| | | agggcaaagccagctctgccaagcagagactgaaatgcgccagcctccagaagttcggcgagagagcttttaa |
| | | ggcctgggccgttgccagactgagccagagatttcctaaggccgagtttgccgaggtgtccaagctcgtgaccga |
| | | tctgacaaaggtgcacaccgagtgctgtcacggcgatctgctggaatgtgccgacgatagagccgacctggcca |
| | | agtatatctgcgagaaccaggacagcatcagcagcaagctgaaagagtgctgcgagaagcccctgctggaaa |
| | | agtctcactgtatcgccgaagtggaaaacgacgagatgcccgccgatctgccttctctggctgccgatttcgtgga |
| | | aagcaaggatgtgtgcaagaactacgccgaggccaaagatgtgtttctgggcatgtttctgtatgagtacgcccgc |
| | | agacaccccgactattctgtggttctgctgctgcggctggccaagacatacgagacaaccctggaaaaatgctgc |
| | | gccgctgccgatcctcacgagtgttatgccaaggtgttcgacgagttcaagccactggtggaagaaccccagaa |
| | | cctgatcaagcagaactgcgagctgttcgagcagctgggcgagtacaagttccagaatgccctgctcgtgcggta |
| | | caccaagaaagtgcctcaggtgtccacacctacactggttgaggtgtcccggaatctgggcaaagtgggcagca |
| | | agtgttgcaagcaccctgaggccaagagaatgccttgcgccgaggattacctgagcgtggtgctgaatcagctgt |
| | | gcgtgctgcacgagaaaacccctgtgtccgacagagtgaccaagtgctgtaccgagagcctcgtgaacagaag |
| | | gccttgctttagcgccctggaagtggacgagacatacgtgcccaaagagttcaacgccgagacattcaccttcca |
| | | cgccgatatctgcaccctgtccgagaaagagcggcagatcaagaagcagacagccctggtcgagctggttaag |
| | | cacaagcccaaggccaccaaagaacagctgaaggccgtgatggacgacttcgccgcctttgtcgagaagtgct |
| | | gcaaggccgacgacaaagagacatgcttcgccgaagagggcaagaaactggtggcctgtgtggaacccctcg |
| | | gcatggaaaacggcaatatcgccaatagccagattgccgccagcagcgtcagagtgacatttctgggactgcaa |
| | | cactgggtgcccgagctggctagactgaatagagccggcatggtcaacgcctggacacccagcagcaacgac |
| | | gataacccctggattcaagtgaacctgctgcggcgtatgtgggtcacaggtgttgttacacagggcgcaagcaga |
| | | ctggcctctcacgagtacctgaaggcctttaaggtggcctacagcctgaacggccacgagttcgacttcatccacg |
| | | acgtgaacaagaagcacaaagagtttgtcggcaactggaacaagaacgccgtgcacgtgaacctgttcgaga |
| | | cacctgtggaagcccagtacgtgcggctgtaccctacaagctgtcacaccgcctgcactctgagattcgaactgct |
| | | gggatgcgagctgaacggctgtgctaatcctctgggcctgaagaacaacagcatccccgataagcagatcacc |
| | | gccagctccagctataagacatggggcctgcacctgttcagctggaacccttcttacgccagactggacaagcag |
| | | ggcaacttcaatgcttgggtggccggcagctacggcaatgatcagtggctgcaagtggatctgggcagcagcaa |
| | | agaagtgacaggcatcatcacccaaggggccagaaatttcggcagcgtgcagttcgtggccagctacaaagtg |
| | | gcctactccaacgacagcgccaactggaccgagtatcaggaccctagaaccggcagctccaagatcttccccg |
| | | gcaattgggacaaccacagccacaagaagaatctcttcgagactcccatcctggccagatatgtgcggattctgc |
| | | ctgtggcctggcacaacagaatcgccctgagactggaactgctcggctgt |
| 108 | Nucleic acid of | gacatctgcgaccccaacccctgcgagaacggcggcatctgcctgcccggcctggccgacggcagcttcagct |
| | Seq ID NO: 102 | gcgagtgccccgacggcttcaccgaccccaactgcagcagcgtggtggaggtggccagcgacgaggaggag |
| | | cccaccgacgcccacaagagcgaggtggcccaccggttcaaggacctgggcgaggagaacttcaaggccct |
| | | ggtgctgatcgccttcgcccagtacctgcagcagagccccttcgaggaccacgtgaagctggtgaacgaggtga |
| | | ccgagttcgccaagacctgcgtggccgacgagagcgccgagaactgcgacaagagcctgcacaccctgttcg |
| | | gcgacaagctgtgcaccgtggccaccctgcgggagacctacggcgagatggccgactgctgcgccaagcagg |
| | | agcccgagcggaacgagtgcttcctgcagcacaaggacgacaaccccaacctgccccggctggtgcggcccg |
| | | aggtggacgtgatgtgcaccgccttccacgacaacgaggagaccttcctgaagaagtacctgtacgagatcgcc |
| | | cggcggcacccctacttctacgcccccgagctgctgttcttcgccaagcggtacaaggccgccttcaccgagtgct |
| | | gccaggccgccgacaaggccgcctgcctgctgcccaagctggacgagctgcgggacgagggcaaggccag |
| | | cagcgccaagcagcggctgaagtgcgccagcctgcagaagttcggcgagcgggccttcaaggcctgggccgt |
| | | ggcccggctgagccagcggttccccaaggccgagttcgccgaggtgagcaagctggtgaccgacctgaccaa |
| | | ggtgcacaccgagtgctgccacggcgacctgctggagtgcgccgacgaccgggccgacctggccaagtacat |
| | | ctgcgagaaccaggacagcatcagcagcaagctgaaggagtgctgcgagaagcccctgctggagaagagcc |
| | | actgcatcgccgaggtggagaacgacgagatgcccgccgacctgcccagcctggccgccgacttcgtggaga |
| | | gcaaggacgtgtgcaagaactacgccgaggccaaggacgtgttcctgggcatgttcctgtacgagtacgcccgg |
| | | cggcaccccgactacagcgtggtgctgctgctgcggctggccaagacctacgagaccaccctggagaagtgct |
| | | gcgccgccgccgacccccacgagtgctacgccaaggtgttcgacgagttcaagcccctggtggaggagcccca |
| | | gaacctgatcaagcagaactgcgagctgttcgagcagctgggcgagtacaagttccagaacgccctgctggtgc |
| | | ggtacaccaagaaggtgccccaggtgagcacccccaccctggtggaggtgagccggaacctgggcaaggtg |
| | | ggcagcaagtgctgcaagcaccccgaggccaagcggatgccctgcgccgaggactacctgagcgtggtgctg |
| | | aaccagctgtgcgtgctgcacgagaagacccccgtgagcgaccgggtgaccaagtgctgcaccgagagcctg |
| | | gtgaaccggcggccctgcttcagcgccctggaggtggacgagacctacgtgcccaaggagttcaacgccgaga |
| | | ccttcaccttccacgccgacatctgcaccctgagcgagaaggagcggcagatcaagaagcagaccgccctggt |
| | | ggagctggtgaagcacaagcccaaggccaccaaggagcagctgaaggccgtgatggacgacttcgccgcctt |
| | | cgtggagaagtgctgcaaggccgacgacaaggagacctgcttcgccgaggagggcaagaagctggtggcct |
| | | gcgtggagcccctgggcatggagaacggcaacatcgccaacagccagatcgccgccagcagcgtgcgggtg |
| | | accttcctgggcctgcagcactgggtgcccgagctggcccggctgaaccgggccggcatggtgaacgcctgga |
| | | cccccagcagcaacgacgacaacccctggatccaggtgaacctgctgcggcggatgtgggtgaccggcgtggt |
| | | gacccagggcgccagccggctggccagccacgagtacctgaaggccttcaaggtggcctacagcctgaacgg |
| | | ccacgagttcgacttcatccacgacgtgaacaagaagcacaaggagttcgtgggcaactggaacaagaacgc |
| | | cgtgcacgtgaacctgttcgagacccccgtggaggcccagtacgtgcggctgtaccccaccagctgccacaccg |
| | | cctgcaccctgcggttcgagctgctgggctgcgagctgaacggctgcgccaaccccctgggcctgaagaacaa |
| | | cagcatccccgacaagcagatcaccgccagcagcagctacaagacctggggcctgcacctgttcagctggaa |
| | | ccccagctacgcccggctggacaagcagggcaacttcaacgcctgggtggccggcagctacggcaacgacc |
| | | agtggctgcaggtggacctgggcagcagcaaggaggtgaccggcatcatcacccagggcgcccggaacttcg |
| | | gcagcgtgcagttcgtggccagctacaaggtggcctacagcaacgacagcgccaactggaccgagtaccagg |
| | | acccccggaccggcagcagcaagatcttccccggcaactgggacaaccacagccacaagaagaacctgttc |
| | | gagacccccatcctggcccggtacgtgcggatcctgcccgtggcctggcacaaccggatcgccctgcggctgga |
| | | gctgctgggctgc |
| 109 | Nucleic acid of | agcgccggcccctgcacccccaacccctgccacaacggcggcacctgcgagatcagcgaggcctaccgggg |
| | Seq ID NO: 103 | cgacaccttcatcggctacgtgtgcaagtgcccccggggcttcaacggcatccactgccagcacgacgcccaca |
| | | agagcgaggtggcccaccggttcaaggacctgggcgaggagaacttcaaggccctggtgctgatcgccttcgc |
| | | ccagtacctgcagcagagccccttcgaggaccacgtgaagctggtgaacgaggtgaccgagttcgccaagacc |
| | | tgcgtggccgacgagagcgccgagaactgcgacaagagcctgcacaccctgttcggcgacaagctgtgcacc |
| | | gtggccaccctgcgggagacctacggcgagatggccgactgctgcgccaagcaggagcccgagcggaacga |
| | | gtgcttcctgcagcacaaggacgacaaccccaacctgccccggctggtgcggcccgaggtggacgtgatgtgc |
| | | accgccttccacgacaacgaggagaccttcctgaagaagtacctgtacgagatcgcccggcggcacccctactt |
| | | ctacgcccccgagctgctgttcttcgccaagcggtacaaggccgccttcaccgagtgctgccaggccgccgaca |
| | | aggccgcctgcctgctgcccaagctggacgagctgcgggacgagggcaaggccagcagcgccaagcagcg |
| | | gctgaagtgcgccagcctgcagaagttcggcgagcgggccttcaaggcctgggccgtggcccggctgagccag |
| | | cggttccccaaggccgagttcgccgaggtgagcaagctggtgaccgacctgaccaaggtgcacaccgagtgct |
| | | gccacggcgacctgctggagtgcgccgacgaccgggccgacctggccaagtacatctgcgagaaccaggac |
| | | agcatcagcagcaagctgaaggagtgctgcgagaagcccctgctggagaagagccactgcatcgccgaggtg |
| | | gagaacgacgagatgcccgccgacctgcccagcctggccgccgacttcgtggagagcaaggacgtgtgcaag |
| | | aactacgccgaggccaaggacgtgttcctgggcatgttcctgtacgagtacgcccggcggcaccccgactacag |
| | | cgtggtgctgctgctgcggctggccaagacctacgagaccaccctggagaagtgctgcgccgccgccgacccc |
| | | cacgagtgctacgccaaggtgttcgacgagttcaagcccctggtggaggagccccagaacctgatcaagcaga |
| | | actgcgagctgttcgagcagctgggcgagtacaagttccagaacgccctgctggtgcggtacaccaagaaggtg |
| | | ccccaggtgagcacccccaccctggtggaggtgagccggaacctgggcaaggtgggcagcaagtgctgcaa |
| | | gcaccccgaggccaagcggatgccctgcgccgaggactacctgagcgtggtgctgaaccagctgtgcgtgctg |
| | | cacgagaagacccccgtgagcgaccgggtgaccaagtgctgcaccgagagcctggtgaaccggcggccctg |
| | | cttcagcgccctggaggtggacgagacctacgtgcccaaggagttcaacgccgagaccttcaccttccacgccg |
| | | acatctgcaccctgagcgagaaggagcggcagatcaagaagcagaccgccctggtggagctggtgaagcac |
| | | aagcccaaggccaccaaggagcagctgaaggccgtgatggacgacttcgccgccttcgtggagaagtgctgc |
| | | aaggccgacgacaaggagacctgcttcgccgaggagggcaagaagctggtggcctgcgtggagcccctggg |
| | | catggagaacggcaacatcgccaacagccagatcgccgccagcagcgtgcgggtgaccttcctgggcctgca |
| | | gcactgggtgcccgagctggcccggctgaaccgggccggcatggtgaacgcctggacccccagcagcaacg |
| | | acgacaacccctggatccaggtgaacctgctgcggcggatgtgggtgaccggcgtggtgacccagggcgcca |
| | | gccggctggccagccacgagtacctgaaggccttcaaggtggcctacagcctgaacggccacgagttcgacttc |
| | | atccacgacgtgaacaagaagcacaaggagttcgtgggcaactggaacaagaacgccgtgcacgtgaacctg |
| | | ttcgagacccccgtggaggcccagtacgtgcggctgtaccccaccagctgccacaccgcctgcaccctgcggtt |
| | | cgagctgctgggctgcgagctgaacggctgcgccaaccccctgggcctgaagaacaacagcatccccgacaa |
| | | gcagatcaccgccagcagcagctacaagacctggggcctgcacctgttcagctggaaccccagctacgcccgg |
| | | ctggacaagcagggcaacttcaacgcctgggtggccggcagctacggcaacgaccagtggctgcaggtggac |
| | | ctgggcagcagcaaggaggtgaccggcatcatcacccagggcgcccggaacttcggcagcgtgcagttcgtg |
| | | gccagctacaaggtggcctacagcaacgacagcgccaactggaccgagtaccaggacccccggaccggca |
| | | gcagcaagatcttccccggcaactgggacaaccacagccacaagaagaacctgttcgagacccccatcctgg |
| | | cccggtacgtgcggatcctgcccgtggcctggcacaaccggatcgccctgcggctggagctgctgggctgc |
| 110 | Nucleic acid of | aacatcaacgagtgcgaggtggagccctgcaagaacggcggcatctgcaccgacctggtggccaactacagc |
| | Seq ID NO: 104 | tgcgagtgccccggcgagttcatgggccggaactgccagtacaaggacgcccacaagagcgaggtggcccac |
| | | cggttcaaggacctgggcgaggagaacttcaaggccctggtgctgatcgccttcgcccagtacctgcagcagag |
| | | ccccttcgaggaccacgtgaagctggtgaacgaggtgaccgagttcgccaagacctgcgtggccgacgagag |
| | | cgccgagaactgcgacaagagcctgcacaccctgttcggcgacaagctgtgcaccgtggccaccctgcggga |
| | | gacctacggcgagatggccgactgctgcgccaagcaggagcccgagcggaacgagtgcttcctgcagcacaa |
| | | ggacgacaaccccaacctgccccggctggtgcggcccgaggtggacgtgatgtgcaccgccttccacgacaac |
| | | gaggagaccttcctgaagaagtacctgtacgagatcgcccggcggcacccctacttctacgcccccgagctgct |
| | | gttcttcgccaagcggtacaaggccgccttcaccgagtgctgccaggccgccgacaaggccgcctgcctgctgc |
| | | ccaagctggacgagctgcgggacgagggcaaggccagcagcgccaagcagcggctgaagtgcgccagcct |
| | | gcagaagttcggcgagcgggccttcaaggcctgggccgtggcccggctgagccagcggttccccaaggccga |
| | | gttcgccgaggtgagcaagctggtgaccgacctgaccaaggtgcacaccgagtgctgccacggcgacctgctg |
| | | gagtgcgccgacgaccgggccgacctggccaagtacatctgcgagaaccaggacagcatcagcagcaagct |
| | | gaaggagtgctgcgagaagcccctgctggagaagagccactgcatcgccgaggtggagaacgacgagatgc |
| | | ccgccgacctgcccagcctggccgccgacttcgtggagagcaaggacgtgtgcaagaactacgccgaggcca |
| | | aggacgtgttcctgggcatgttcctgtacgagtacgcccggcggcaccccgactacagcgtggtgctgctgctgcg |
| | | gctggccaagacctacgagaccaccctggagaagtgctgcgccgccgccgacccccacgagtgctacgccaa |
| | | ggtgttcgacgagttcaagcccctggtggaggagccccagaacctgatcaagcagaactgcgagctgttcgagc |
| | | agctgggcgagtacaagttccagaacgccctgctggtgcggtacaccaagaaggtgccccaggtgagcacccc |
| | | caccctggtggaggtgagccggaacctgggcaaggtgggcagcaagtgctgcaagcaccccgaggccaagc |
| | | ggatgccctgcgccgaggactacctgagcgtggtgctgaaccagctgtgcgtgctgcacgagaagacccccgtg |
| | | agcgaccgggtgaccaagtgctgcaccgagagcctggtgaaccggcggccctgcttcagcgccctggaggtgg |
| | | acgagacctacgtgcccaaggagttcaacgccgagaccttcaccttccacgccgacatctgcaccctgagcgag |
| | | aaggagcggcagatcaagaagcagaccgccctggtggagctggtgaagcacaagcccaaggccaccaagg |
| | | agcagctgaaggccgtgatggacgacttcgccgccttcgtggagaagtgctgcaaggccgacgacaaggaga |
| | | cctgcttcgccgaggagggcaagaagctggtggcctgcgtggagcccctgggcatggagaacggcaacatcg |
| | | ccaacagccagatcgccgccagcagcgtgcgggtgaccttcctgggcctgcagcactgggtgcccgagctggc |
| | | ccggctgaaccgggccggcatggtgaacgcctggacccccagcagcaacgacgacaacccctggatccagg |
| | | tgaacctgctgcggcggatgtgggtgaccggcgtggtgacccagggcgccagccggctggccagccacgagt |
| | | acctgaaggccttcaaggtggcctacagcctgaacggccacgagttcgacttcatccacgacgtgaacaagaa |
| | | gcacaaggagttcgtgggcaactggaacaagaacgccgtgcacgtgaacctgttcgagacccccgtggaggc |
| | | ccagtacgtgcggctgtaccccaccagctgccacaccgcctgcaccctgcggttcgagctgctgggctgcgagct |
| | | gaacggctgcgccaaccccctgggcctgaagaacaacagcatccccgacaagcagatcaccgccagcagca |
| | | gctacaagacctggggcctgcacctgttcagctggaaccccagctacgcccggctggacaagcagggcaactt |
| | | caacgcctgggtggccggcagctacggcaacgaccagtggctgcaggtggacctgggcagcagcaaggagg |
| | | tgaccggcatcatcacccagggcgcccggaacttcggcagcgtgcagttcgtggccagctacaaggtggcctac |
| | | agcaacgacagcgccaactggaccgagtaccaggacccccggaccggcagcagcaagatcttccccggca |
| | | actgggacaaccacagccacaagaagaacctgttcgagacccccatcctggcccggtacgtgcggatcctgcc |
| | | cgtggcctggcacaaccggatcgccctgcggctggagctgctgggctgc |
| 111 | Nucleic acid of | gacatctgcgaccccaacccctgcgagaacggcggcatctgcctgcccggcctggccgacggcagcttcagct |
| | Seq ID NO: 105 | gcgagtgccccgacggcttcaccgaccccaactgcagcagcgtggtggaggtggccagcgacgaggaggag |
| | | cccaccagcgccggcccctgcacccccaacccctgccacaacggcggcacctgcgagatcagcgaggccta |
| | | ccggggcgacaccttcatcggctacgtgtgcaagtgcccccggggcttcaacggcatccactgccagcacgacg |
| | | cccacaagagcgaggtggcccaccggttcaaggacctgggcgaggagaacttcaaggccctggtgctgatcg |
| | | ccttcgcccagtacctgcagcagagccccttcgaggaccacgtgaagctggtgaacgaggtgaccgagttcgcc |
| | | aagacctgcgtggccgacgagagcgccgagaactgcgacaagagcctgcacaccctgttcggcgacaagctg |
| | | tgcaccgtggccaccctgcgggagacctacggcgagatggccgactgctgcgccaagcaggagcccgagcg |
| | | gaacgagtgcttcctgcagcacaaggacgacaaccccaacctgccccggctggtgcggcccgaggtggacgt |
| | | gatgtgcaccgccttccacgacaacgaggagaccttcctgaagaagtacctgtacgagatcgcccggcggcac |
| | | ccctacttctacgcccccgagctgctgttcttcgccaagcggtacaaggccgccttcaccgagtgctgccaggccg |
| | | ccgacaaggccgcctgcctgctgcccaagctggacgagctgcgggacgagggcaaggccagcagcgccaa |
| | | gcagcggctgaagtgcgccagcctgcagaagttcggcgagcgggccttcaaggcctgggccgtggcccggctg |
| | | agccagcggttccccaaggccgagttcgccgaggtgagcaagctggtgaccgacctgaccaaggtgcacacc |
| | | gagtgctgccacggcgacctgctggagtgcgccgacgaccgggccgacctggccaagtacatctgcgagaac |
| | | caggacagcatcagcagcaagctgaaggagtgctgcgagaagcccctgctggagaagagccactgcatcgc |
| | | cgaggtggagaacgacgagatgcccgccgacctgcccagcctggccgccgacttcgtggagagcaaggacgt |
| | | gtgcaagaactacgccgaggccaaggacgtgttcctgggcatgttcctgtacgagtacgcccggcggcaccccg |
| | | actacagcgtggtgctgctgctgcggctggccaagacctacgagaccaccctggagaagtgctgcgccgccgc |
| | | cgacccccacgagtgctacgccaaggtgttcgacgagttcaagcccctggtggaggagccccagaacctgatc |
| | | aagcagaactgcgagctgttcgagcagctgggcgagtacaagttccagaacgccctgctggtgcggtacacca |
| | | agaaggtgccccaggtgagcacccccaccctggtggaggtgagccggaacctgggcaaggtgggcagcaag |
| | | tgctgcaagcaccccgaggccaagcggatgccctgcgccgaggactacctgagcgtggtgctgaaccagctgt |
| | | gcgtgctgcacgagaagacccccgtgagcgaccgggtgaccaagtgctgcaccgagagcctggtgaaccggc |
| | | ggccctgcttcagcgccctggaggtggacgagacctacgtgcccaaggagttcaacgccgagaccttcaccttc |
| | | cacgccgacatctgcaccctgagcgagaaggagcggcagatcaagaagcagaccgccctggtggagctggt |
| | | gaagcacaagcccaaggccaccaaggagcagctgaaggccgtgatggacgacttcgccgccttcgtggaga |
| | | agtgctgcaaggccgacgacaaggagacctgcttcgccgaggagggcaagaagctggtggcctgcgtggagc |
| | | ccctgggcatggagaacggcaacatcgccaacagccagatcgccgccagcagcgtgcgggtgaccttcctgg |
| | | gcctgcagcactgggtgcccgagctggcccggctgaaccgggccggcatggtgaacgcctggacccccagca |
| | | gcaacgacgacaacccctggatccaggtgaacctgctgcggcggatgtgggtgaccggcgtggtgacccagg |
| | | gcgccagccggctggccagccacgagtacctgaaggccttcaaggtggcctacagcctgaacggccacgagtt |
| | | cgacttcatccacgacgtgaacaagaagcacaaggagttcgtgggcaactggaacaagaacgccgtgcacgt |
| | | gaacctgttcgagacccccgtggaggcccagtacgtgcggctgtaccccaccagctgccacaccgcctgcacc |
| | | ctgcggttcgagctgctgggctgcgagctgaacggctgcgccaaccccctgggcctgaagaacaacagcatcc |
| | | ccgacaagcagatcaccgccagcagcagctacaagacctggggcctgcacctgttcagctggaaccccagct |
| | | acgcccggctggacaagcagggcaacttcaacgcctgggtggccggcagctacggcaacgaccagtggctgc |
| | | aggtggacctgggcagcagcaaggaggtgaccggcatcatcacccagggcgcccggaacttcggcagcgtg |
| | | cagttcgtggccagctacaaggtggcctacagcaacgacagcgccaactggaccgagtaccaggacccccgg |
| | | accggcagcagcaagatcttccccggcaactgggacaaccacagccacaagaagaacctgttcgagacccc |
| | | catcctggcccggtacgtgcggatcctgcccgtggcctggcacaaccggatcgccctgcggctggagctgctgg |
| | | gctgc |
| 112 | Nucleic acid of | agcgccggcccctgcacccccaacccctgccacaacggcggcacctgcgagatcagcgaggcctaccgggg |
| | Seq ID NO: 106 | cgacaccttcatcggctacgtgtgcaagtgcccccggggcttcaacggcatccactgccagcacaacatcaacg |
| | | agtgcgaggtggagccctgcaagaacggcggcatctgcaccgacctggtggccaactacagctgcgagtgccc |
| | | cggcgagttcatgggccggaactgccagtacaaggacgcccacaagagcgaggtggcccaccggttcaagg |
| | | acctgggcgaggagaacttcaaggccctggtgctgatcgccttcgcccagtacctgcagcagagccccttcgag |
| | | gaccacgtgaagctggtgaacgaggtgaccgagttcgccaagacctgcgtggccgacgagagcgccgagaa |
| | | ctgcgacaagagcctgcacaccctgttcggcgacaagctgtgcaccgtggccaccctgcgggagacctacggc |
| | | gagatggccgactgctgcgccaagcaggagcccgagcggaacgagtgcttcctgcagcacaaggacgacaa |
| | | ccccaacctgccccggctggtgcggcccgaggtggacgtgatgtgcaccgccttccacgacaacgaggagacc |
| | | ttcctgaagaagtacctgtacgagatcgcccggcggcacccctacttctacgcccccgagctgctgttcttcgccaa |
| | | gcggtacaaggccgccttcaccgagtgctgccaggccgccgacaaggccgcctgcctgctgcccaagctggac |
| | | gagctgcgggacgagggcaaggccagcagcgccaagcagcggctgaagtgcgccagcctgcagaagttcg |
| | | gcgagcgggccttcaaggcctgggccgtggcccggctgagccagcggttccccaaggccgagttcgccgaggt |
| | | gagcaagctggtgaccgacctgaccaaggtgcacaccgagtgctgccacggcgacctgctggagtgcgccga |
| | | cgaccgggccgacctggccaagtacatctgcgagaaccaggacagcatcagcagcaagctgaaggagtgct |
| | | gcgagaagcccctgctggagaagagccactgcatcgccgaggtggagaacgacgagatgcccgccgacctg |
| | | cccagcctggccgccgacttcgtggagagcaaggacgtgtgcaagaactacgccgaggccaaggacgtgttcc |
| | | tgggcatgttcctgtacgagtacgcccggcggcaccccgactacagcgtggtgctgctgctgcggctggccaaga |
| | | cctacgagaccaccctggagaagtgctgcgccgccgccgacccccacgagtgctacgccaaggtgttcgacga |
| | | gttcaagcccctggtggaggagccccagaacctgatcaagcagaactgcgagctgttcgagcagctgggcgag |
| | | tacaagttccagaacgccctgctggtgcggtacaccaagaaggtgccccaggtgagcacccccaccctggtgg |
| | | aggtgagccggaacctgggcaaggtgggcagcaagtgctgcaagcaccccgaggccaagcggatgccctgc |
| | | gccgaggactacctgagcgtggtgctgaaccagctgtgcgtgctgcacgagaagacccccgtgagcgaccgg |
| | | gtgaccaagtgctgcaccgagagcctggtgaaccggcggccctgcttcagcgccctggaggtggacgagacct |
| | | acgtgcccaaggagttcaacgccgagaccttcaccttccacgccgacatctgcaccctgagcgagaaggagcg |
| | | gcagatcaagaagcagaccgccctggtggagctggtgaagcacaagcccaaggccaccaaggagcagctg |
| | | aaggccgtgatggacgacttcgccgccttcgtggagaagtgctgcaaggccgacgacaaggagacctgcttcg |
| | | ccgaggagggcaagaagctggtggcctgcgtggagcccctgggcatggagaacggcaacatcgccaacagc |
| | | cagatcgccgccagcagcgtgcgggtgaccttcctgggcctgcagcactgggtgcccgagctggcccggctga |
| | | accgggccggcatggtgaacgcctggacccccagcagcaacgacgacaacccctggatccaggtgaacctg |
| | | ctgcggcggatgtgggtgaccggcgtggtgacccagggcgccagccggctggccagccacgagtacctgaag |
| | | gccttcaaggtggcctacagcctgaacggccacgagttcgacttcatccacgacgtgaacaagaagcacaagg |
| | | agttcgtgggcaactggaacaagaacgccgtgcacgtgaacctgttcgagacccccgtggaggcccagtacgt |
| | | gcggctgtaccccaccagctgccacaccgcctgcaccctgcggttcgagctgctgggctgcgagctgaacggct |
| | | gcgccaaccccctgggcctgaagaacaacagcatccccgacaagcagatcaccgccagcagcagctacaag |
| | | acctggggcctgcacctgttcagctggaaccccagctacgcccggctggacaagcagggcaacttcaacgcct |
| | | gggtggccggcagctacggcaacgaccagtggctgcaggtggacctgggcagcagcaaggaggtgaccggc |
| | | atcatcacccagggcgcccggaacttcggcagcgtgcagttcgtggccagctacaaggtggcctacagcaacg |
| | | acagcgccaactggaccgagtaccaggacccccggaccggcagcagcaagatcttccccggcaactgggac |
| | | aaccacagccacaagaagaacctgttcgagacccccatcctggcccggtacgtgcggatcctgcccgtggcctg |
| | | gcacaaccggatcgccctgcggctggagctgctgggctgc |
| 113 | Nucleic acid of | gacatctgcgaccccaacccctgcgagaacggcggcatctgcctgcccggcctggccgacggcagcttcagct |
| | Seq ID NO: 107 | gcgagtgccccgacggcttcaccgaccccaactgcagcagcgtggtggaggtggccagcgacgaggaggag |
| | | cccaccaacatcaacgagtgcgaggtggagccctgcaagaacggcggcatctgcaccgacctggtggccaac |
| | | tacagctgcgagtgccccggcgagttcatgggccggaactgccagtacaaggacgcccacaagagcgaggtg |
| | | gcccaccggttcaaggacctgggcgaggagaacttcaaggccctggtgctgatcgccttcgcccagtacctgca |
| | | gcagagccccttcgaggaccacgtgaagctggtgaacgaggtgaccgagttcgccaagacctgcgtggccga |
| | | cgagagcgccgagaactgcgacaagagcctgcacaccctgttcggcgacaagctgtgcaccgtggccaccct |
| | | gcgggagacctacggcgagatggccgactgctgcgccaagcaggagcccgagcggaacgagtgcttcctgc |
| | | agcacaaggacgacaaccccaacctgccccggctggtgcggcccgaggtggacgtgatgtgcaccgccttcc |
| | | acgacaacgaggagaccttcctgaagaagtacctgtacgagatcgcccggcggcacccctacttctacgccccc |
| | | gagctgctgttcttcgccaagcggtacaaggccgccttcaccgagtgctgccaggccgccgacaaggccgcctg |
| | | cctgctgcccaagctggacgagctgcgggacgagggcaaggccagcagcgccaagcagcggctgaagtgc |
| | | gccagcctgcagaagttcggcgagcgggccttcaaggcctgggccgtggcccggctgagccagcggttcccca |
| | | aggccgagttcgccgaggtgagcaagctggtgaccgacctgaccaaggtgcacaccgagtgctgccacggcg |
| | | acctgctggagtgcgccgacgaccgggccgacctggccaagtacatctgcgagaaccaggacagcatcagca |
| | | gcaagctgaaggagtgctgcgagaagcccctgctggagaagagccactgcatcgccgaggtggagaacgac |
| | | gagatgcccgccgacctgcccagcctggccgccgacttcgtggagagcaaggacgtgtgcaagaactacgcc |
| | | gaggccaaggacgtgttcctgggcatgttcctgtacgagtacgcccggcggcaccccgactacagcgtggtgctg |
| | | ctgctgcggctggccaagacctacgagaccaccctggagaagtgctgcgccgccgccgacccccacgagtgct |
| | | acgccaaggtgttcgacgagttcaagcccctggtggaggagccccagaacctgatcaagcagaactgcgagct |
| | | gttcgagcagctgggcgagtacaagttccagaacgccctgctggtgcggtacaccaagaaggtgccccaggtg |
| | | agcacccccaccctggtggaggtgagccggaacctgggcaaggtgggcagcaagtgctgcaagcaccccga |
| | | ggccaagcggatgccctgcgccgaggactacctgagcgtggtgctgaaccagctgtgcgtgctgcacgagaag |
| | | acccccgtgagcgaccgggtgaccaagtgctgcaccgagagcctggtgaaccggcggccctgcttcagcgccc |
| | | tggaggtggacgagacctacgtgcccaaggagttcaacgccgagaccttcaccttccacgccgacatctgcacc |
| | | ctgagcgagaaggagcggcagatcaagaagcagaccgccctggtggagctggtgaagcacaagcccaagg |
| | | ccaccaaggagcagctgaaggccgtgatggacgacttcgccgccttcgtggagaagtgctgcaaggccgacg |
| | | acaaggagacctgcttcgccgaggagggcaagaagctggtggcctgcgtggagcccctgggcatggagaacg |
| | | gcaacatcgccaacagccagatcgccgccagcagcgtgcgggtgaccttcctgggcctgcagcactgggtgcc |
| | | cgagctggcccggctgaaccgggccggcatggtgaacgcctggacccccagcagcaacgacgacaacccct |
| | | ggatccaggtgaacctgctgcggcggatgtgggtgaccggcgtggtgacccagggcgccagccggctggcca |
| | | gccacgagtacctgaaggccttcaaggtggcctacagcctgaacggccacgagttcgacttcatccacgacgtg |
| | | aacaagaagcacaaggagttcgtgggcaactggaacaagaacgccgtgcacgtgaacctgttcgagaccccc |
| | | gtggaggcccagtacgtgcggctgtaccccaccagctgccacaccgcctgcaccctgcggttcgagctgctggg |
| | | ctgcgagctgaacggctgcgccaaccccctgggcctgaagaacaacagcatccccgacaagcagatcaccgc |
| | | cagcagcagctacaagacctggggcctgcacctgttcagctggaaccccagctacgcccggctggacaagca |
| | | gggcaacttcaacgcctgggtggccggcagctacggcaacgaccagtggctgcaggtggacctgggcagcag |
| | | caaggaggtgaccggcatcatcacccagggcgcccggaacttcggcagcgtgcagttcgtggccagctacaag |
| | | gtggcctacagcaacgacagcgccaactggaccgagtaccaggacccccggaccggcagcagcaagatctt |
| | | ccccggcaactgggacaaccacagccacaagaagaacctgttcgagacccccatcctggcccggtacgtgcg |
| | | gatcctgcccgtggcctggcacaaccggatcgccctgcggctggagctgctgggctgc |
| 82 | EGF[MFG- | LDICSKNPCHNGGLCEEISQEVRGDVFPSYTCTCLKGYAGNHCETKDAHKSEVA |
| | E8]_HSA[A626- | HRFKDLGEENFKALVLIAFAQYLQQSPFEDHVKLVNEVTEFAKTCVADESAENCD |
| | L633]removed_ | KSLHTLFGDKLCTVATLRETYGEMADCCAKQEPERNECFLQHKDDNPNLPRLVR |
| | C1_C2[EDIL3] | PEVDVMCTAFHDNEETFLKKYLYEIARRHPYFYAPELLFFAKRYKAAFTECCQAA |
| | | DKAACLLPKLDELRDEGKASSAKQRLKCASLQKFGERAFKAWAVARLSQRFPKA |
| | | EFAEVSKLVTDLTKVHTECCHGDLLECADDRADLAKYICENQDSISSKLKECCEK |
| | | PLLEKSHCIAEVENDEMPADLPSLAADFVESKDVCKNYAEAKDVFLGMFLYEYAR |
| | | RHPDYSVVLLLRLAKTYETTLEKCCAAADPHECYAKVFDEFKPLVEEPQNLIKQN |
| | | CELFEQLGEYKFQNALLVRYTKKVPQVSTPTLVEVSRNLGKVGSKCCKHPEAKR |
| | | MPCAEDYLSVVLNQLCVLHEKTPVSDRVTKCCTESLVNRRPCFSALEVDETYVP |
| | | KEFNAETFTFHADICTLSEKERQIKKQTALVELVKHKPKATKEQLKAVMDDFAAFV |
| | | EKCCKADDKETCFAEEGKKLVACSGPLGIEGGIISNQQITASSTHRALFGLQKWY |
| | | PYYARLNKKGLINAWTAAENDRWPWIQINLQRKMRVTGVITQGAKRIGSPEYIKS |
| | | YKIAYSNDGKTWAMYKVKGTNEDMVFRGNIDNNTPYANSFTPPIKAQYVRLYPQ |
| | | VCRRHCTLRMELLGCELSGCSEPLGMKSGHIQDYQITASSIFRTLNMDMFTWEP |
| | | RKARLDKQGKVNAWTSGHNDQSQWLQVDLLVPTKVTGIITQGAKDFGHVQFVG |
| | | SYKLAYSNDGEHWTVYQDEKQRKDKVFQGNFDNDTHRKNVIDPPIYARHIRILP |
| | | WSWYGRITLRSELLGC |
| 83 | Nucleic acid of | ctggacatctgtagcaagaacccttgccacaacggcggcctgtgcgaagagatttctcaagaagtgcggggcga |
| | Seq ID NO: 82 | cgttttccccagctacacctgtacatgtctgaagggctacgccggcaaccactgcgagacaaaggatgcccaca |
| | | agagcgaggtggcccacagattcaaggatctgggcgaagagaacttcaaggccctggtgctgatcgccttcgct |
| | | cagtatctccagcagagccctttcgaggaccacgtgaagctggtcaacgaagtgaccgagttcgccaagacctg |
| | | tgtggccgatgagagcgccgagaactgtgataagagcctgcacaccctgttcggcgacaagctgtgtacagtgg |
| | | ccacactgagagaaacctacggcgagatggccgactgctgtgccaagcaagagcccgagagaaacgagtgc |
| | | ttcctccagcacaaggacgacaaccccaacctgcctagactcgtgcgacccgaagtggatgtgatgtgcaccgc |
| | | ctttcacgacaacgaggaaaccttcctgaagaagtacctgtacgagatcgccagacggcacccctacttttatgcc |
| | | cctgagctgctgttcttcgccaagcggtataaggccgccttcaccgaatgttgccaggccgctgataaggctgcctg |
| | | tctgctgcctaagctggacgagctgagagatgagggcaaagccagctctgccaagcagagactgaaatgcgcc |
| | | agcctccagaagttcggcgagagagcttttaaggcctgggccgttgccagactgagccagagatttcctaaggcc |
| | | gagtttgccgaggtgtccaagctcgtgaccgatctgacaaaggtgcacaccgagtgctgtcacggcgatctgctg |
| | | gaatgtgccgacgatagagccgacctggccaagtacatctgcgagaaccaggacagcatcagcagcaagctg |
| | | aaagagtgctgcgagaagcccctgctggaaaagtctcactgtatcgccgaggtggaaaacgacgagatgcctg |
| | | ccgatctgcctagcctggctgccgatttcgtggaaagcaaggacgtgtgcaagaactacgccgaggccaaggat |
| | | gtgtttctgggcatgtttctgtatgagtacgcccgcagacaccccgactattctgtggttctgctgctgcggctggcca |
| | | aaacctacgagacaaccctggaaaaatgctgcgccgctgccgatcctcacgagtgttatgccaaggtgttcgac |
| | | gagttcaagcctctggtggaagaaccccagaacctgatcaagcagaactgcgagctgttcgagcagctgggcg |
| | | agtacaagttccagaatgccctgctcgtgcggtacaccaagaaagtgcctcaggtgtccacacctacactggttg |
| | | aggtgtcccggaatctgggcaaagtgggcagcaagtgttgcaagcaccctgaggccaagagaatgccttgcgc |
| | | cgaggattacctgagcgtggtgctgaatcagctgtgcgtgctgcacgagaaaacccctgtgtccgacagagtgac |
| | | caagtgctgtaccgagagcctcgtgaacagaaggccttgctttagcgccctggaagtggacgagacatacgtgc |
| | | ccaaagagttcaacgccgagacattcaccttccacgccgacatctgcaccctgtccgagaaagagcggcagat |
| | | caagaagcagacagccctggtcgagctggttaagcacaagcccaaggccaccaaagaacagctgaaggcc |
| | | gtgatggacgacttcgccgcctttgtcgagaagtgctgcaaggccgacgacaaagagacatgcttcgccgaaga |
| | | gggcaagaaactggtggcctgttctggccctctgggcatcgaaggcggcatcatcagcaatcagcagatcaccg |
| | | ccagcagcacccacagagcactgtttggcctgcaaaagtggtatccctactacgcccggctgaacaagaaggg |
| | | cctgattaacgcctggacagccgccgagaatgacagatggccctggattcagatcaacctccagcggaagatg |
| | | agagtgaccggcgttatcacacagggcgcaaagagaatcggctcccctgagtacatcaagagctacaagatcg |
| | | cctacagcaacgacggcaagacctgggccatgtacaaagtgaagggcaccaacgaggacatggtgttccggg |
| | | gcaacatcgacaacaacaccccttacgccaacagcttcacccctcctatcaaggcccagtacgtgcggctgtac |
| | | cctcaagtgtgcagaaggcactgtaccctgagaatggaactgctgggctgcgaactgtctggctgttctgagccac |
| | | tgggaatgaagtccggccacatccaggactaccagattaccgcctccagcatcttcagaaccctgaacatggata |
| | | tgttcacctgggagccccggaaggccagactggataagcagggaaaagtgaatgcctggaccagcggccaca |
| | | acgaccagtctcaatggctgcaagtggacctgctggtgcctaccaaagtgaccggaatcatcacccaaggcgct |
| | | aaggatttcggccacgtgcagttcgtgggctcctacaagctggcctactccaatgatggcgagcactggaccgtgt |
| | | accaggacgagaagcagcggaaggataaggtgttccagggaaacttcgataacgatacccaccggaagaac |
| | | gtgatcgaccctccaatctacgccagacacatcagaatcctgccttggtcttggtacggcagaatcaccctgagat |
| | | ccgagctgctgggatgc |
| 115 | EGF-C1-His6 | LDICSKNPCHNGGLCEEISQEVRGDVFPSYTCTCLKGYAGNHCETKCVEPLGME |
| | | NGNIANSQIAASSVRVTFLGLQHWVPELARLNRAGMVNAWTPSSNDDNPWIQV |
| | | NLLRRMWVTGVVTQGASRLASHEYLKAFKVAYSLNGHEFDFIHDVNKKHKEFVG |
| | | NWNKNAVHVNLFETPVEAQYVRLYPTSCHTACTLRFELLGCELNGHHHHHH |
| 116 | Nucleic acid of | ctggacatctgtagcaagaacccttgccacaacggcggcctgtgcgaagagatttctcaagaagtgcggggcga |
| | 115 | cgttttccccagctacacctgtacatgtctgaagggctacgccggcaaccactgcgagacaaaatgtgtggaacc |
| | | cctcggcatggaaaacggcaatatcgccaatagccagatcgccgccagcagcgtcagagtgacatttctggga |
| | | ctgcaacactgggtgccagagctggccagactgaatagagccggcatggttaacgcctggacacccagcagc |
| | | aacgacgacaacccctggattcaagtgaacctgctgcggcgtatgtgggtcacaggtgttgttacacagggcgca |
| | | agcagactggccagccacgagtatctgaaggcctttaaggtggcctacagcctgaacggccacgagttcgactt |
| | | catccacgacgtgaacaagaagcacaaagagttcgtcggcaactggaacaagaacgccgtgcacgtgaacct |
| | | gttcgagacacctgtggaagcccagtacgtgcggctgtaccctacaagctgtcacaccgcctgcacactgagatt |
| | | cgagctgctgggctgtgaactgaatggccaccaccaccatcaccac |
| 117 | EGF-HSA-C1 | LDICSKNPCHNGGLCEEISQEVRGDVFPSYTCTCLKGYAGNHCETKGSDAHKSE |
| = 147 | | VAHRFKDLGEENFKALVLIAFAQYLQQSPFEDHVKLVNEVTEFAKTCVADESAEN |
| | | CDKSLHTLFGDKLCTVATLRETYGEMADCCAKQEPERNECFLQHKDDNPNLPRL |
| | | VRPEVDVMCTAFHDNEETFLKKYLYEIARRHPYFYAPELLFFAKRYKAAFTECCQ |
| | | AADKAACLLPKLDELRDEGKASSAKQRLKCASLQKFGERAFKAWAVARLSQRFP |
| | | KAEFAEVSKLVTDLTKVHTECCHGDLLECADDRADLAKYICENQDSISSKLKECC |
| | | EKPLLEKSHCIAEVENDEMPADLPSLAADFVESKDVCKNYAEAKDVFLGMFLYEY |
| | | ARRHPDYSVVLLLRLAKTYETTLEKCCAAADPHECYAKVFDEFKPLVEEPQNLIK |
| | | QNCELFEQLGEYKFQNALLVRYTKKVPQVSTPTLVEVSRNLGKVGSKCCKHPEA |
| | | KRMPCAEDYLSVVLNQLCVLHEKTPVSDRVTKCCTESLVNRRPCFSALEVDETY |
| | | VPKEFNAETFTFHADICTLSEKERQIKKQTALVELVKHKPKATKEQLKAVMDDFA |
| | | AFVEKCCKADDKETCFAEEGKKLVAASQAALGLGGSGGSGGSGGSCVEPLGM |
| | | ENGNIANSQIAASSVRVTFLGLQHWVPELARLNRAGMVNAWTPSSNDDNPWIQ |
| | | VNLLRRMWVTGVVTQGASRLASHEYLKAFKVAYSLNGHEFDFIHDVNKKHKEFV |
| | | GNWNKNAVHVNLFETPVEAQYVRLYPTSCHTACTLRFELLGCELNG |
| 118 | Nucleic acid of | ctggacatctgtagcaagaacccttgccacaacggcggcctgtgcgaagagatttctcaagaagtgcggggcga |
| | 117 | cgttttccccagctacacctgtacatgtctgaagggctacgccggcaaccactgcgagacaaaaggatctgatgc |
| | | ccacaagagcgaggtggcccacagattcaaggatctgggcgaagagaacttcaaggccctggtgctgatcgcc |
| | | ttcgctcagtatctccagcagagccctttcgaggaccacgtgaagctggtcaacgaagtgaccgagttcgccaag |
| | | acctgtgtggccgatgagagcgccgagaactgtgataagagcctgcacaccctgttcggcgacaagctgtgtac |
| | | agtggccacactgagagaaacctacggcgagatggccgactgctgtgccaagcaagagcccgagagaaacg |
| | | agtgcttcctccagcacaaggacgacaaccccaacctgcctagactcgtgcgacccgaagtggatgtgatgtgc |
| | | accgcctttcacgacaacgaggaaaccttcctgaagaagtacctgtacgagatcgccagacggcacccctacttt |
| | | tatgcccctgagctgctgttcttcgccaagcggtataaggccgccttcaccgaatgttgccaggccgctgataaggc |
| | | tgcctgtctgctgcctaagctggacgagctgagagatgagggcaaagccagctctgccaagcagagactgaaat |
| | | gcgccagcctccagaagttcggcgagagagcttttaaggcctgggccgttgccagactgagccagagatttccta |
| | | aggccgagtttgccgaggtgtccaagctcgtgaccgatctgacaaaggtgcacaccgagtgctgtcacggcgat |
| | | ctgctggaatgtgccgacgatagagccgacctggccaagtacatctgcgagaaccaggacagcatcagcagc |
| | | aagctgaaagagtgctgcgagaagcccctgctggaaaagtctcactgtatcgccgaggtggaaaacgacgag |
| | | atgcctgccgatctgcctagcctggctgccgatttcgtggaaagcaaggacgtgtgcaagaactacgccgaggc |
| | | caaggatgtgtttctgggcatgtttctgtatgagtacgcccgcagacaccccgactattctgtggttctgctgctgcgg |
| | | ctggccaaaacctacgagacaaccctggaaaaatgctgcgccgctgccgatcctcacgagtgttatgccaaggt |
| | | gttcgacgagttcaagcctctggtggaagaaccccagaacctgatcaagcagaactgcgagctgttcgagcagc |
| | | tgggcgagtacaagttccagaatgccctgctcgtgcggtacaccaagaaagtgcctcaggtgtccacacctacac |
| | | tggttgaggtgtcccggaatctgggcaaagtgggcagcaagtgttgcaagcaccctgaggccaagagaatgcct |
| | | tgcgccgaggattacctgagcgtggtgctgaatcagctgtgcgtgctgcacgagaaaacccctgtgtccgacaga |
| | | gtgaccaagtgctgtaccgagagcctcgtgaacagaaggccttgctttagcgccctggaagtggacgagacata |
| | | cgtgcccaaagagttcaacgccgagacattcaccttccacgccgacatctgcaccctgtccgagaaagagcgg |
| | | cagatcaagaagcagacagccctggtcgagctggttaagcacaagcccaaggccaccaaagaacagctgaa |
| | | ggccgtgatggacgacttcgccgcctttgtcgagaagtgctgcaaggccgacgacaaagagacatgcttcgccg |
| | | aagagggcaagaaactggtggctgcctctcaggctgctctcggacttggtggaagcggaggaagtggtggatct |
| | | ggcggatcttgtgtggaacccctcggcatggaaaacggcaatatcgccaatagccagattgccgccagcagcgt |
| | | cagagtgacatttctgggactgcaacactgggtgcccgagctggctagactgaatagagccggcatggtcaacg |
| | | cctggacacccagcagcaacgacgataatccctggattcaagtgaacctgctgcggcgtatgtgggtcacaggt |
| | | gttgttacacagggcgcaagcagactggccagccacgagtatctgaaggcctttaaggtggcctacagcctgaa |
| | | cggccacgagttcgacttcatccacgacgtgaacaagaagcacaaagagtttgtcggcaactggaacaagaac |
| | | gccgtgcacgtgaacctgttcgagacacctgtggaagcccagtacgtgcggctgtaccctacaagctgtcacacc |
| | | gcctgcactctgagattcgaactgctgggatgcgagctgaacggc |
| 119 | EGF-HSA-C1 | LDICSKNPCHNGGLCEEISQEVRGDVFPSYTCTCLKGYAGNHCETKDAHKSEVA |
| = 74 | | HRFKDLGEENFKALVLIAFAQYLQQSPFEDHVKLVNEVTEFAKTCVADESAENCD |
| | | KSLHTLFGDKLCTVATLRETYGEMADCCAKQEPERNECFLQHKDDNPNLPRLVR |
| | | PEVDVMCTAFHDNEETFLKKYLYEIARRHPYFYAPELLFFAKRYKAAFTECCQAA |
| | | DKAACLLPKLDELRDEGKASSAKQRLKCASLQKFGERAFKAWAVARLSQRFPKA |
| | | EFAEVSKLVTDLTKVHTECCHGDLLECADDRADLAKYICENQDSISSKLKECCEK |
| | | PLLEKSHCIAEVENDEMPADLPSLAADFVESKDVCKNYAEAKDVFLGMFLYEYAR |
| | | RHPDYSVVLLLRLAKTYETTLEKCCAAADPHECYAKVFDEFKPLVEEPQNLIKQN |
| | | CELFEQLGEYKFQNALLVRYTKKVPQVSTPTLVEVSRNLGKVGSKCCKHPEAKR |
| | | MPCAEDYLSVVLNQLCVLHEKTPVSDRVTKCCTESLVNRRPCFSALEVDETYVP |
| | | KEFNAETFTFHADICTLSEKERQIKKQTALVELVKHKPKATKEQLKAVMDDFAAFV |
| | | EKCCKADDKETCFAEEGKKLVAASQAALCVEPLGMENGNIANSQIAASSVRVTFL |
| | | GLQHWVPELARLNRAGMVNAWTPSSNDDNPWIQVNLLRRMWVTGVVTQGASR |
| | | LASHEYLKAFKVAYSLNGHEFDFIHDVNKKHKEFVGNWNKNAVHVNLFETPVEA |
| | | QYVRLYPTSCHTACTLRFELLGCELNG |
| 120 | Nucleic acid of | ctggacatctgtagcaagaacccttgccacaacggcggcctgtgcgaagagatttctcaagaagtgcggggcga |
| | 119 | cgttttccccagctacacctgtacatgtctgaagggctacgccggcaaccactgcgagacaaaggatgcccaca |
| | | agagcgaggtggcccacagattcaaggatctgggcgaagagaacttcaaggccctggtgctgatcgccttcgct |
| | | cagtatctccagcagagccctttcgaggaccacgtgaagctggtcaacgaagtgaccgagttcgccaagacctg |
| | | tgtggccgatgagagcgccgagaactgtgataagagcctgcacaccctgttcggcgacaagctgtgtacagtgg |
| | | ccacactgagagaaacctacggcgagatggccgactgctgtgccaagcaagagcccgagagaaacgagtgc |
| | | ttcctccagcacaaggacgacaaccccaacctgcctagactcgtgcgacccgaagtggatgtgatgtgcaccgc |
| | | ctttcacgacaacgaggaaaccttcctgaagaagtacctgtacgagatcgccagacggcacccctacttttatgcc |
| | | cctgagctgctgttcttcgccaagcggtataaggccgccttcaccgaatgttgccaggccgctgataaggctgcctg |
| | | tctgctgcctaagctggacgagctgagagatgagggcaaagccagctctgccaagcagagactgaaatgcgcc |
| | | agcctccagaagttcggcgagagagcttttaaggcctgggccgttgccagactgagccagagatttcctaaggcc |
| | | gagtttgccgaggtgtccaagctcgtgaccgatctgacaaaggtgcacaccgagtgctgtcacggcgatctgctg |
| | | gaatgtgccgacgatagagccgacctggccaagtacatctgcgagaaccaggacagcatcagcagcaagctg |
| | | aaagagtgctgcgagaagcccctgctggaaaagtctcactgtatcgccgaggtggaaaacgacgagatgcctg |
| | | ccgatctgcctagcctggctgccgatttcgtggaaagcaaggacgtgtgcaagaactacgccgaggccaaggat |
| | | gtgtttctgggcatgtttctgtatgagtacgcccgcagacaccccgactattctgtggttctgctgctgcggctggcca |
| | | aaacctacgagacaaccctggaaaaatgctgcgccgctgccgatcctcacgagtgttatgccaaggtgttcgac |
| | | gagttcaagcctctggtggaagaaccccagaacctgatcaagcagaactgcgagctgttcgagcagctgggcg |
| | | agtacaagttccagaatgccctgctcgtgcggtacaccaagaaagtgcctcaggtgtccacacctacactggttg |
| | | aggtgtcccggaatctgggcaaagtgggcagcaagtgttgcaagcaccctgaggccaagagaatgccttgcgc |
| | | cgaggattacctgagcgtggtgctgaatcagctgtgcgtgctgcacgagaaaacccctgtgtccgacagagtgac |
| | | caagtgctgtaccgagagcctcgtgaacagaaggccttgctttagcgccctggaagtggacgagacatacgtgc |
| | | ccaaagagttcaacgccgagacattcaccttccacgccgacatctgcaccctgtccgagaaagagcggcagat |
| | | caagaagcagacagccctggtcgagctggttaagcacaagcccaaggccaccaaagaacagctgaaggcc |
| | | gtgatggacgacttcgccgcctttgtcgagaagtgctgcaaggccgacgacaaagagacatgcttcgccgaaga |
| | | gggcaagaaactggtggctgcttctcaggccgctctgtgtgtggaacccctcggcatggaaaacggcaatatcgc |
| | | caatagccagattgccgccagcagcgtcagagtgacatttctgggactgcaacactgggtgcccgagctggcta |
| | | gactgaatagagccggcatggtcaacgcctggacacccagcagcaacgacgataatccctggattcaagtgaa |
| | | cctgctgcggcgtatgtgggtcacaggtgttgttacacagggcgcaagcagactggccagccacgagtatctgaa |
| | | ggcctttaaggtggcctacagcctgaacggccacgagttcgacttcatccacgacgtgaacaagaagcacaaa |
| | | gagtttgtcggcaactggaacaagaacgccgtgcacgtgaacctgttcgagacacctgtggaagcccagtacgt |
| | | gcggctgtaccctacaagctgtcacaccgcctgcactctgagattcgaactgctgggatgcgagctgaacggc |
| 121 | FP135 | LDICSKNPCHNGGLCEEISQEVRGDVFPSYTCTCLKGYAGNHCETKDAHKSEVA |
| = 73 | | HRFKDLGEENFKALVLIAFAQYLQQSPFEDHVKLVNEVTEFAKTCVADESAENCD |
| | | KSLHTLFGDKLCTVATLRETYGEMADCCAKQEPERNECFLQHKDDNPNLPRLVR |
| | | PEVDVMCTAFHDNEETFLKKYLYEIARRHPYFYAPELLFFAKRYKAAFTECCQAA |
| | | DKAACLLPKLDELRDEGKASSAKQRLKCASLQKFGERAFKAWAVARLSQRFPKA |
| | | EFAEVSKLVTDLTKVHTECCHGDLLECADDRADLAKYICENQDSISSKLKECCEK |
| | | PLLEKSHCIAEVENDEMPADLPSLAADFVESKDVCKNYAEAKDVFLGMFLYEYAR |
| | | RHPDYSVVLLLRLAKTYETTLEKCCAAADPHECYAKVFDEFKPLVEEPQNLIKQN |
| | | CELFEQLGEYKFQNALLVRYTKKVPQVSTPTLVEVSRNLGKVGSKCCKHPEAKR |
| | | MPCAEDYLSVVLNQLCVLHEKTPVSDRVTKCCTESLVNRRPCFSALEVDETYVP |
| | | KEFNAETFTFHADICTLSEKERQIKKQTALVELVKHKPKATKEQLKAVMDDFAAFV |
| | | EKCCKADDKETCFAEEGKKLVACVEPLGMENGNIANSQIAASSVRVTFLGLQHW |
| | | VPELARLNRAGMVNAWTPSSNDDNPWIQVNLLRRMWVTGVVTQGASRLASHE |
| | | YLKAFKVAYSLNGHEFDFIHDVNKKHKEFVGNWNKNAVHVNLFETPVEAQYVRL |
| | | YPTSCHTACTLRFELLGCELNG |
| 122 | Nucleic acid of | ctggacatctgtagcaagaacccttgccacaacggcggcctgtgcgaagagatttctcaagaagtgcggggcga |
| | 121 | cgttttccccagctacacctgtacatgtctgaagggctacgccggcaaccactgcgagacaaaggatgcccaca |
| | | agagcgaggtggcccacagattcaaggatctgggcgaagagaacttcaaggccctggtgctgatcgccttcgct |
| | | cagtatctccagcagagccctttcgaggaccacgtgaagctggtcaacgaagtgaccgagttcgccaagacctg |
| | | tgtggccgatgagagcgccgagaactgtgataagagcctgcacaccctgttcggcgacaagctgtgtacagtgg |
| | | ccacactgagagaaacctacggcgagatggccgactgctgtgccaagcaagagcccgagagaaacgagtgc |
| | | ttcctccagcacaaggacgacaaccccaacctgcctagactcgtgcgacccgaagtggatgtgatgtgcaccgc |
| | | ctttcacgacaacgaggaaaccttcctgaagaagtacctgtacgagatcgccagacggcacccctacttttatgcc |
| | | cctgagctgctgttcttcgccaagcggtataaggccgccttcaccgaatgttgccaggccgctgataaggctgcctg |
| | | tctgctgcctaagctggacgagctgagagatgagggcaaagccagctctgccaagcagagactgaaatgcgcc |
| | | agcctccagaagttcggcgagagagcttttaaggcctgggccgttgccagactgagccagagatttcctaaggcc |
| | | gagtttgccgaggtgtccaagctcgtgaccgatctgacaaaggtgcacaccgagtgctgtcacggcgatctgctg |
| | | gaatgtgccgacgatagagccgacctggccaagtacatctgcgagaaccaggacagcatcagcagcaagctg |
| | | aaagagtgctgcgagaagcccctgctggaaaagtctcactgtatcgccgaggtggaaaacgacgagatgcctg |
| | | ccgatctgcctagcctggctgccgatttcgtggaaagcaaggacgtgtgcaagaactacgccgaggccaaggat |
| | | gtgtttctgggcatgtttctgtatgagtacgcccgcagacaccccgactattctgtggttctgctgctgcggctggcca |
| | | aaacctacgagacaaccctggaaaaatgctgcgccgctgccgatcctcacgagtgttatgccaaggtgttcgac |
| | | gagttcaagcctctggtggaagaaccccagaacctgatcaagcagaactgcgagctgttcgagcagctgggcg |
| | | agtacaagttccagaatgccctgctcgtgcggtacaccaagaaagtgcctcaggtgtccacacctacactggttg |
| | | aggtgtcccggaatctgggcaaagtgggcagcaagtgttgcaagcaccctgaggccaagagaatgccttgcgc |
| | | cgaggattacctgagcgtggtgctgaatcagctgtgcgtgctgcacgagaaaacccctgtgtccgacagagtgac |
| | | caagtgctgtaccgagagcctcgtgaacagaaggccttgctttagcgccctggaagtggacgagacatacgtgc |
| | | ccaaagagttcaacgccgagacattcaccttccacgccgacatctgcaccctgtccgagaaagagcggcagat |
| | | caagaagcagacagccctggtcgagctggttaagcacaagcccaaggccaccaaagaacagctgaaggcc |
| | | gtgatggacgacttcgccgcctttgtcgagaagtgctgcaaggccgacgacaaagagacatgcttcgccgaaga |
| | | gggcaagaaactggtggcctgtgtggaacccctcggcatggaaaacggcaatatcgccaatagccagattgcc |
| | | gccagcagcgtcagagtgacatttctgggactgcaacactgggtgcccgagctggctagactgaatagagccgg |
| | | catggtcaacgcctggacacccagcagcaacgacgataatccctggattcaagtgaacctgctgcggcgtatgt |
| | | gggtcacaggtgttgttacacagggcgcaagcagactggccagccacgagtatctgaaggcctttaaggtggcct |
| | | acagcctgaacggccacgagttcgacttcatccacgacgtgaacaagaagcacaaagagtttgtcggcaactg |
| | | gaacaagaacgccgtgcacgtgaacctgttcgagacacctgtggaagcccagtacgtgcggctgtaccctaca |
| | | agctgtcacaccgcctgcactctgagattcgaactgctgggatgcgagctgaacggc |
| 123 | hIgG1_FC_DAP | DKTHTCPPCPAPELLGGPSVFLFPPKPKDTLMISRTPEVTRVVSAVSHEDPEVKF |
| | A_Hole | NWYVDGVEVHNAKTKPREEQYNSTYRWSVLTVLHQDWLNGKEYKCKVSNKAL |
| | | AAPIEKTISKAKGQPREPQVCTLPPSRDELTKNQVSLSCAVKGFYPSDIAVEWES |
| | | NGQPENNYKTTPPVLDSDGSFFLVSKLTVDKSRWQQGNVFSCSVMHEALHNHY |
| | | TQKSLSLSPGK |
| 124 | Nucleic acid of | gataagacccacacctgtcctccatgtcctgctccagaactgctcggcggaccctccgttttcctgtttccacctaag |
| | 123 | cctaaggacaccctgatgatcagcagaacccctgaagtgacctgtgtggtggtggccgtgtctcacgaagatccc |
| | | gaagtgaagttcaattggtacgtggacggcgtggaagtgcacaacgccaagaccaagcctagagaggaacag |
| | | tacaacagcacctacagagtggtgtccgtgctgaccgtgctgcaccaggattggctgaacggcaaagagtacaa |
| | | gtgcaaggtgtccaacaaggccctggccgctcctatcgagaaaaccatctctaaggccaagggccagcctcgg |
| | | gaacctcaagtctgtacactgcctcctagccgggacgagctgaccaaaaatcaggtgtccctgagctgcgccgtg |
| | | aagggcttttacccttccgatatcgccgtggaatgggagagcaatggccagcctgagaacaactacaagaccac |
| | | acctcctgtgctggacagcgacggctcattctttctggtgtccaagctgacagtggacaagagcagatggcagca |
| | | gggcaacgtgttcagctgttctgtgatgcacgaggccctgcacaaccactacacccagaagtctctgtctctgagc |
| | | cccggcaaa |
| 125 | EGF_hIgG1_FC | LDICSKNPCHNGGLCEEISQEVRGDVFPSYTCTCLKGYAGNHCETKGSDKTHTC |
| | _DAPA_Knob_ | PPCPAPELLGGPSVFLFPPKPKDTLMISRTPEVTRVVSAVSHEDPEVKFNWYVD |
| | 01 | GVEVHNAKTKPREEQYNSTYRWSVLTVLHQDWLNGKEYKCKVSNKALAAPIEK |
| | | TISKAKGQPREPQVYTLPPCREEMTKNQVSLWCLVKGFYPSDIAVEWESNGQP |
| | | ENNYKTTPPVLDSDGSFFLYSKLTVDKSRWQQGNVFSCSVMHEALHNHYTQKS |
| | | LSLSPGKGGSGGSGGSGGSCVEPLGMENGNIANSQIAASSVRVTFLGLQHWVP |
| | | ELARLNRAGMVNAWTPSSNDDNPWIQVNLLRRMWVTGVVTQGASRLASHEYL |
| | | KAFKVAYSLNGHEFDFIHDVNKKHKEFVGNWNKNAVHVNLFETPVEAQYVRLYP |
| | | TSCHTACTLRFELLGCELNGCANPLGLKNNSIPDKQITASSSYKTWGLHLFSWNP |
| | | SYARLDKQGNFNAWVAGSYGNDQWLQVDLGSSKEVTGIITQGARNFGSVQFVA |
| | | SYKVAYSNDSANWTEYQDPRTGSSKIFPGNWDNHSHKKNLFETPILARYVRILPV |
| | | AWHNRIALRLELLGC |
| 126 | Nucleic acid of | ctggacatctgtagcaagaacccttgccacaacggcggcctgtgcgaagagatttctcaagaagtgcggggcga |
| | 125 | cgttttccccagctacacctgtacatgtctgaagggctacgccggcaaccactgcgagacaaagggcagcgata |
| | | agacccacacctgtcctccatgtcctgctccagaactgctcggcggaccctccgttttcctgtttccacctaagccta |
| | | aggacaccctgatgatcagcagaacccctgaagtgacctgtgtggtggtggccgtgtctcacgaagatcccgaa |
| | | gtgaagttcaattggtacgtggacggcgtggaagtgcacaacgccaagaccaagcctagagaggaacagtac |
| | | aacagcacctacagagtggtgtccgtgctgaccgtgctgcaccaggattggctgaacggcaaagagtacaagtg |
| | | caaggtgtccaacaaggccctggccgctcctatcgagaaaaccatctctaaggccaagggccagcctcgggaa |
| | | cctcaggtttacaccctgcctccatgccgggaagagatgaccaagaatcaggtgtccctgtggtgcctggtcaag |
| | | ggcttctacccttccgatatcgccgtggaatgggagagcaatggccagcctgagaacaactacaagaccacacc |
| | | tcctgtgctggacagcgacggctcattcttcctgtacagcaagctgacagtggacaagagcagatggcagcagg |
| | | gcaacgtgttcagctgttctgtgatgcacgaggccctgcacaaccactacacccagaagtctctgtctctgagccct |
| | | ggcaaaggcggaagcggtggaagcggaggatctggcggatcttgtgtggaacccctcggcatggaaaacggc |
| | | aatatcgccaatagccagatcgccgccagcagcgtcagagtgacatttctgggactgcaacactgggtgccaga |
| | | gctggccagactgaatagagccggcatggttaacgcctggacacccagcagcaacgacgacaacccctggatt |
| | | caagtgaacctgctgcggcgtatgtgggtcacaggtgttgttacacagggcgcaagcagactggccagccacga |
| | | gtatctgaaggcctttaaggtggcctacagcctgaacggccacgagttcgacttcatccacgacgtgaacaagaa |
| | | gcacaaagagttcgtcggcaactggaacaagaacgccgtgcacgtgaacctgttcgagacacctgtggaagcc |
| | | cagtacgtgcggctgtaccctacaagctgtcacaccgcctgcacactgagattcgagctgctgggctgcgagctg |
| | | aatggctgtgctaatcctctgggcctgaagaacaatagcatccccgacaagcagatcaccgcctccagcagctat |
| | | aagacatggggcctgcacctgtttagctggaaccctagctacgccagactggacaagcagggaaacttcaatgc |
| | | ctgggtggccggcagctacggcaatgatcaatggctgcaagtggacctgggcagcagcaaagaagtgaccgg |
| | | catcattacccagggcgctagaaatttcggcagcgtgcagttcgtggccagctacaaagtggcctactccaacga |
| | | cagcgccaactggaccgagtatcaggaccctagaaccggcagctccaagatcttccccggcaattgggacaac |
| | | cacagccacaagaagaatctgttcgaaacccctatcctggccagatatgtgcgcattctgcccgtggcctggcac |
| | | aacagaattgccctgagactggaactgctgggatgc |
| 127 | hIgG1_FC_DAP | DKTHTCPPCPAPELLGGPSVFLFPPKPKDTLMISRTPEVTRVVSAVSHEDPEVKF |
| | A_Knob | NWYVDGVEVHNAKTKPREEQYNSTYRWSVLTVLHQDWLNGKEYKCKVSNKAL |
| | | AAPIEKTISKAKGQPREPQVYTLPPCREEMTKNQVSLWCLVKGFYPSDIAVEWE |
| | | SNGQPENNYKTTPPVLDSDGSFFLYSKLTVDKSRWQQGNVFSCSVMHEALHNH |
| | | YTQKSLSLSPGK |
| 128 | Nucleic acid of | gataagacccacacctgtcctccatgtcctgctccagaactgctcggcggaccctccgttttcctgtttccacctaag |
| | 127 | cctaaggacaccctgatgatcagcagaacccctgaagtgacctgtgtggtggtggccgtgtctcacgaagatccc |
| | | gaagtgaagttcaattggtacgtggacggcgtggaagtgcacaacgccaagaccaagcctagagaggaacag |
| | | tacaacagcacctacagagtggtgtccgtgctgaccgtgctgcaccaggattggctgaacggcaaagagtacaa |
| | | gtgcaaggtgtccaacaaggccctggccgctcctatcgagaaaaccatctctaaggccaagggccagcctcgg |
| | | gaacctcaggtttacaccctgcctccatgccgggaagagatgaccaagaatcaggtgtccctgtggtgcctggtc |
| | | aagggcttctacccttccgatatcgccgtggaatgggagagcaatggccagcctgagaacaactacaagacca |
| | | cacctcctgtgctggacagcgacggctcattcttcctgtacagcaagctgacagtggacaagagcagatggcag |
| | | cagggcaacgtgttcagctgttctgtgatgcacgaggccctgcacaaccactacacccagaagtctctgtctctga |
| | | gccccggcaaa |
| 129 | EGF_hIgG1_FC | LDICSKNPCHNGGLCEEISQEVRGDVFPSYTCTCLKGYAGNHCETKGSDKTHTC |
| | _DAPA_Hole_C | PPCPAPELLGGPSVFLFPPKPKDTLMISRTPEVTRVVSAVSHEDPEVKFNWYVD |
| | 1 | GVEVHNAKTKPREEQYNSTYRWSVLTVLHQDWLNGKEYKCKVSNKALAAPIEK |
| | | TISKAKGQPREPQVCTLPPSRDELTKNQVSLSCAVKGFYPSDIAVEWESNGQPE |
| | | NNYKTTPPVLDSDGSFFLVSKLTVDKSRWQQGNVFSCSVMHEALHNHYTQKSL |
| | | SLSPGKGGSGGSGGSGGSCVEPLGMENGNIANSQIAASSVRVTFLGLQHWVPE |
| | | LARLNRAGMVNAWTPSSNDDNPWIQVNLLRRMWVTGVVTQGASRLASHEYLK |
| | | AFKVAYSLNGHEFDFIHDVNKKHKEFVGNWNKNAVHVNLFETPVEAQYVRLYPT |
| | | SCHTACTLRFELLGCELNGCANPLGLKNNSIPDKQITASSSYKTWGLHLFSWNPS |
| | | YARLDKQGNFNAWVAGSYGNDQWLQVDLGSSKEVTGIITQGARNFGSVQFVAS |
| | | YKVAYSNDSANWTEYQDPRTGSSKIFPGNWDNHSHKKNLFETPILARYVRILPVA |
| | | WHNRIALRLELLGC |
| 130 | Nucleic acid of | ctggacatctgtagcaagaacccttgccacaacggcggcctgtgcgaagagatttctcaagaagtgcggggcga |
| | 129 | cgttttccccagctacacctgtacatgtctgaagggctacgccggcaaccactgcgagacaaagggcagcgata |
| | | agacccacacctgtcctccatgtcctgctccagaactgctcggcggaccctccgttttcctgtttccacctaagccta |
| | | aggacaccctgatgatcagcagaacccctgaagtgacctgtgtggtggtggccgtgtctcacgaagatcccgaa |
| | | gtgaagttcaattggtacgtggacggcgtggaagtgcacaacgccaagaccaagcctagagaggaacagtac |
| | | aacagcacctacagagtggtgtccgtgctgaccgtgctgcaccaggattggctgaacggcaaagagtacaagtg |
| | | caaggtgtccaacaaggccctggccgctcctatcgagaaaaccatctctaaggccaagggccagcctcgggaa |
| | | cctcaagtctgtacactgcctcctagccgggacgagctgaccaaaaatcaggtgtccctgagctgcgccgtgaag |
| | | ggcttttacccttccgatatcgccgtggaatgggagagcaatggccagcctgagaacaactacaagaccacacc |
| | | tcctgtgctggacagcgacggctcattctttctggtgtccaagctgacagtggacaagagcagatggcagcaggg |
| | | caacgtgttcagctgttctgtgatgcacgaggccctgcacaaccactacacccagaagtctctgtctctgagccctg |
| | | gcaaaggcggaagcggtggaagcggaggatctggcggatcttgtgtggaacccctcggcatggaaaacggca |
| | | atatcgccaatagccagatcgccgccagcagcgtcagagtgacatttctgggactgcaacactgggtgccagag |
| | | ctggccagactgaatagagccggcatggttaacgcctggacacccagcagcaacgacgacaacccctggattc |
| | | aagtgaacctgctgcggcgtatgtgggtcacaggtgttgttacacagggcgcaagcagactggccagccacgag |
| | | tatctgaaggcctttaaggtggcctacagcctgaacggccacgagttcgacttcatccacgacgtgaacaagaag |
| | | cacaaagagttcgtcggcaactggaacaagaacgccgtgcacgtgaacctgttcgagacacctgtggaagccc |
| | | agtacgtgcggctgtaccctacaagctgtcacaccgcctgcacactgagattcgagctgctgggctgcgagctga |
| | | atggctgtgctaatcctctgggcctgaagaacaatagcatccccgacaagcagatcaccgcctccagcagctata |
| | | agacatggggcctgcacctgtttagctggaaccctagctacgccagactggacaagcagggaaacttcaatgcc |
| | | tgggtggccggcagctacggcaatgatcaatggctgcaagtggacctgggcagcagcaaagaagtgaccggc |
| | | atcattacccagggcgctagaaatttcggcagcgtgcagttcgtggccagctacaaagtggcctactccaacgac |
| | | agcgccaactggaccgagtatcaggaccctagaaccggcagctccaagatcttccccggcaattgggacaacc |
| | | acagccacaagaagaatctgttcgaaacccctatcctggccagatatgtgcgcattctgcccgtggcctggcaca |
| | | acagaattgccctgagactggaactgctgggatgc |
| 131 | EGF(RGE)_HS | LDICSKNPCHNGGLCEEISQEVRGEVFPSYTCTCLKGYAGNHCETKDAHKSEVA |
| | A[A626- | HRFKDLGEENFKALVLIAFAQYLQQSPFEDHVKLVNEVTEFAKTCVADESAENCD |
| | L633]removed_ | KSLHTLFGDKLCTVATLRETYGEMADCCAKQEPERNECFLQHKDDNPNLPRLVR |
| | 01 | PEVDVMCTAFHDNEETFLKKYLYEIARRHPYFYAPELLFFAKRYKAAFTECCQAA |
| | | DKAACLLPKLDELRDEGKASSAKQRLKCASLQKFGERAFKAWAVARLSQRFPKA |
| | | EFAEVSKLVTDLTKVHTECCHGDLLECADDRADLAKYICENQDSISSKLKECCEK |
| | | PLLEKSHCIAEVENDEMPADLPSLAADFVESKDVCKNYAEAKDVFLGMFLYEYAR |
| | | RHPDYSVVLLLRLAKTYETTLEKCCAAADPHECYAKVFDEFKPLVEEPQNLIKQN |
| | | CELFEQLGEYKFQNALLVRYTKKVPQVSTPTLVEVSRNLGKVGSKCCKHPEAKR |
| | | MPCAEDYLSVVLNQLCVLHEKTPVSDRVTKCCTESLVNRRPCFSALEVDETYVP |
| | | KEFNAETFTFHADICTLSEKERQIKKQTALVELVKHKPKATKEQLKAVMDDFAAFV |
| | | EKCCKADDKETCFAEEGKKLVACVEPLGMENGNIANSQIAASSVRVTFLGLQHW |
| | | VPELARLNRAGMVNAWTPSSNDDNPWIQVNLLRRMWVTGVVTQGASRLASHE |
| | | YLKAFKVAYSLNGHEFDFIHDVNKKHKEFVGNWNKNAVHVNLFETPVEAQYVRL |
| | | YPTSCHTACTLRFELLGCELNG |
| 132 | Nucleic acid of | ctggacatctgtagcaagaacccttgccacaacggcggcctgtgcgaagagatcagtcaagaagtgcggggcg |
| | 131 | aagtctttcccagctacacctgtacctgtctgaagggctatgccggcaaccactgcgagacaaaggatgcccaca |
| | | agagcgaggtggcccacagattcaaggatctgggcgaagagaacttcaaggccctggtgctgatcgccttcgct |
| | | cagtatctccagcagagccctttcgaggaccacgtgaagctggtcaacgaagtgaccgagttcgccaagacctg |
| | | tgtggccgatgagagcgccgagaactgtgataagagcctgcacaccctgttcggcgacaagctgtgtacagtgg |
| | | ccacactgagagaaacctacggcgagatggccgactgctgtgccaagcaagagcccgagagaaacgagtgc |
| | | ttcctccagcacaaggacgacaaccccaacctgcctagactcgtgcgacccgaagtggatgtgatgtgcaccgc |
| | | ctttcacgacaacgaggaaaccttcctgaagaagtacctgtacgagatcgccagacggcacccctacttttatgcc |
| | | cctgagctgctgttcttcgccaagcggtataaggccgccttcaccgaatgttgccaggccgctgataaggctgcctg |
| | | tctgctgcctaagctggacgagctgagagatgagggcaaagccagctctgccaagcagagactgaaatgcgcc |
| | | agcctccagaagttcggcgagagagcttttaaggcctgggccgttgccagactgagccagagatttcctaaggcc |
| | | gagtttgccgaggtgtccaagctcgtgaccgatctgacaaaggtgcacaccgagtgctgtcacggcgatctgctg |
| | | gaatgtgccgacgatagagccgacctggccaagtacatctgcgagaaccaggacagcatcagcagcaagctg |
| | | aaagagtgctgcgagaagcccctgctggaaaagtctcactgtatcgccgaggtggaaaacgacgagatgcctg |
| | | ccgatctgcctagcctggctgccgatttcgtggaaagcaaggacgtgtgcaagaactacgccgaggccaaggat |
| | | gtgtttctgggcatgtttctgtatgagtacgcccgcagacaccccgactattctgtggttctgctgctgcggctggcca |
| | | aaacctacgagacaaccctggaaaaatgctgcgccgctgccgatcctcacgagtgttatgccaaggtgttcgac |
| | | gagttcaagcctctggtggaagaaccccagaacctgatcaagcagaactgcgagctgttcgagcagctgggcg |
| | | agtacaagttccagaatgccctgctcgtgcggtacaccaagaaagtgcctcaggtgtccacacctacactggttg |
| | | aggtgtcccggaatctgggcaaagtgggcagcaagtgttgcaagcaccctgaggccaagagaatgccttgcgc |
| | | cgaggattatctgagcgtggtgctgaatcagctgtgcgtgctgcacgagaaaacccctgtgtccgacagagtgac |
| | | caagtgctgtaccgagagcctcgtgaacagaaggccttgctttagcgccctggaagtggacgagacatacgtgc |
| | | ccaaagagttcaacgccgagacattcaccttccacgccgacatctgcaccctgtccgagaaagagcggcagat |
| | | caagaagcagacagccctggtcgagctggttaagcacaagcccaaggccaccaaagaacagctgaaggcc |
| | | gtgatggacgacttcgccgcctttgtcgagaagtgctgcaaggccgacgacaaagagacatgcttcgccgaaga |
| | | gggcaagaaactggtggcctgtgtggaacccctcggcatggaaaacggcaatatcgccaatagccagattgcc |
| | | gccagcagcgtcagagtgacatttctgggactgcaacactgggtgcccgagctggctagactgaatagagccgg |
| | | catggtcaacgcctggacacccagcagcaacgacgataatccctggattcaagtgaacctgctgcggcgtatgt |
| | | gggtcacaggtgttgttacacagggcgcaagcagactggccagccacgagtatctgaaggcctttaaggtggcct |
| | | acagcctgaacggccacgagttcgacttcatccacgacgtgaacaagaagcacaaagagtttgtcggcaactg |
| | | gaacaagaacgccgtgcacgtgaacctgttcgagacacctgtggaagcccagtacgtgcggctgtaccctaca |
| | | agctgtcacaccgcctgcactctgagattcgaactgctgggatgcgagctgaacggc |
| 133 | EGF[EDIL3]_HS | DICDPNPCENGGICLPGLADGSFSCECPDGFTDPNCSSWEVASDEEEPTSAGP |
| = 71 | A[A626- | CTPNPCHNGGTCEISEAYRGDTFIGYVCKCPRGFNGIHCQHNINECEVEPCKNG |
| | L633]removed_ | GICTDLVANYSCECPGEFMGRNCQYKDAHKSEVAHRFKDLGEENFKALVLIAFA |
| | C1[EDIL3] | QYLQQSPFEDHVKLVNEVTEFAKTCVADESAENCDKSLHTLFGDKLCTVATLRE |
| | | TYGEMADCCAKQEPERNECFLQHKDDNPNLPRLVRPEVDVMCTAFHDNEETFL |
| | | KKYLYEIARRHPYFYAPELLFFAKRYKAAFTECCQAADKAACLLPKLDELRDEGK |
| | | ASSAKQRLKCASLQKFGERAFKAWAVARLSQRFPKAEFAEVSKLVTDLTKVHTE |
| | | CCHGDLLECADDRADLAKYICENQDSISSKLKECCEKPLLEKSHCIAEVENDEMP |
| | | ADLPSLAADFVESKDVCKNYAEAKDVFLGMFLYEYARRHPDYSVVLLLRLAKTYE |
| | | TTLEKCCAAADPHECYAKVFDEFKPLVEEPQNLIKQNCELFEQLGEYKFQNALLV |
| | | RYTKKVPQVSTPTLVEVSRNLGKVGSKCCKHPEAKRMPCAEDYLSVVLNQLCVL |
| | | HEKTPVSDRVTKCCTESLVNRRPCFSALEVDETYVPKEFNAETFTFHADICTLSE |
| | | KERQIKKQTALVELVKHKPKATKEQLKAVMDDFAAFVEKCCKADDKETCFAEEG |
| | | KKLVACSGPLGIEGGIISNQQITASSTHRALFGLQKWYPYYARLNKKGLINAWTAA |
| | | ENDRWPWIQINLQRKMRVTGVITQGAKRIGSPEYIKSYKIAYSNDGKTWAMYKVK |
| | | GTNEDMVFRGNIDNNTPYANSFTPPIKAQYVRLYPQVCRRHCTLRMELLGCELS |
| | | G |
| 134 | Nucleic acid of | gacatctgcgaccccaatccttgcgagaatggcggcatttgtctgcctggactggccgatggcagcttctcttgtga |
| | 133 | atgccccgatggcttcacagaccccaattgcagctctgtggtggaagtggccagcgacgaggaagaacctaca |
| | | agcgctggcccctgcacacccaatccatgtcataatggcggaacctgcgagatcagcgaggcctacagaggcg |
| | | ataccttcatcggctacgtgtgcaagtgccccagaggcttcaatggcatccactgccagcacaacatcaacgagt |
| | | gcgaggtggaaccatgcaagaacggcggcatctgtaccgacctggtggccaattactcttgcgagtgccctggc |
| | | gagttcatgggcagaaactgccagtacaaggacgcccacaagagcgaggtggcccacagattcaaggacctg |
| | | ggcgaagagaacttcaaggccctggtgctgatcgccttcgctcagtatctccagcagagccctttcgaggaccac |
| | | gtgaagctggtcaacgaagtgaccgagttcgccaagacctgtgtggccgatgagagcgccgagaactgtgaca |
| | | agagcctgcacacactgttcggcgacaagctgtgtaccgtggccacactgagagaaacctacggcgagatggc |
| | | cgactgctgtgccaagcaagagcccgagagaaacgagtgcttcctccagcacaaggatgacaaccccaacct |
| | | gcctagactcgtgcggcctgaagtggatgtgatgtgcaccgcctttcacgacaacgaggaaaccttcctgaagaa |
| | | gtacctgtacgagatcgccagacggcacccctacttttatgcccctgagctgctgttcttcgccaagcggtataagg |
| | | ccgccttcaccgaatgttgccaggccgctgataaggctgcctgtctgctgcctaagctggacgagctgagagatg |
| | | agggcaaagccagctctgccaagcagagactgaaatgcgccagcctccagaagttcggcgagagagcttttaa |
| | | ggcctgggccgttgccagactgagccagagatttcctaaggccgagtttgccgaggtgtccaagctcgtgaccga |
| | | tctgacaaaggtgcacaccgagtgctgtcacggcgatctgctggaatgtgccgacgatagagccgacctggcca |
| | | agtatatctgcgagaaccaggacagcatcagcagcaagctgaaagagtgctgcgagaagcccctgctggaaa |
| | | agtctcactgtatcgccgaagtggaaaacgacgagatgcccgccgatctgccttctctggctgccgatttcgtgga |
| | | aagcaaggatgtgtgcaagaactacgccgaggccaaagatgtgtttctgggcatgtttctgtatgagtacgcccgc |
| | | agacaccccgactattctgtggttctgctgctgcggctggccaagacatacgagacaaccctggaaaaatgctgc |
| | | gccgctgccgatcctcacgagtgttatgccaaggtgttcgacgagttcaagccactggtggaagaaccccagaa |
| | | cctgatcaagcagaactgcgagctgttcgagcagctgggcgagtacaagttccagaatgccctgctcgtgcggta |
| | | caccaagaaagtgcctcaggtgtccacacctacactggttgaggtgtcccggaatctgggcaaagtgggcagca |
| | | agtgttgcaagcaccctgaggccaagagaatgccttgcgccgaggattacctgagcgtggtgctgaatcagctgt |
| | | gcgtgctgcacgagaaaacccctgtgtccgacagagtgaccaagtgctgtaccgagagcctcgtgaacagaag |
| | | gccttgctttagcgccctggaagtggacgagacatacgtgcccaaagagttcaacgccgagacattcaccttcca |
| | | cgccgatatctgcaccctgtccgagaaagagcggcagatcaagaagcagacagccctggtcgagctggttaag |
| | | cacaagcccaaggccaccaaagaacagctgaaggccgtgatggacgacttcgccgcctttgtcgagaagtgct |
| | | gcaaggccgacgacaaagagacatgcttcgccgaagagggcaagaaactggtggcctgttctggccctctggg |
| | | catcgaaggcggcatcatcagcaatcagcagatcaccgccagcagcacccacagagcactgtttggcctgcaa |
| | | aagtggtatccctactacgcccggctgaacaagaagggcctgattaacgcctggacagccgccgagaatgaca |
| | | gatggccctggattcagatcaacctccagcggaagatgagagtgaccggcgttatcacacagggcgcaaagag |
| | | aatcggctcccctgagtacatcaagagctacaagatcgcctacagcaacgacggcaagacctgggccatgtac |
| | | aaagtgaagggcaccaacgaggacatggtgttccggggcaacatcgacaacaacaccccttacgccaacag |
| | | cttcacccctcctatcaaggcccagtacgtgcggctgtaccctcaagtgtgcagaaggcactgtaccctgagaatg |
| | | gaactgctgggctgcgaactgtctggc |
| 135 | EGF[EDIL3]_HS | DICDPNPCENGGICLPGLADGSFSCECPDGFTDPNCSSWEVASDEEEPTSAGP |
| | A[A626- | CTPNPCHNGGTCEISEAYRGDTFIGYVCKCPRGFNGIHCQHNINECEVEPCKNG |
| | L633]removed_ | GICTDLVANYSCECPGEFMGRNCQYKDAHKSEVAHRFKDLGEENFKALVLIAFA |
| | C2[EDIL3] | QYLQQSPFEDHVKLVNEVTEFAKTCVADESAENCDKSLHTLFGDKLCTVATLRE |
| | | TYGEMADCCAKQEPERNECFLQHKDDNPNLPRLVRPEVDVMCTAFHDNEETFL |
| | | KKYLYEIARRHPYFYAPELLFFAKRYKAAFTECCQAADKAACLLPKLDELRDEGK |
| | | ASSAKQRLKCASLQKFGERAFKAWAVARLSQRFPKAEFAEVSKLVTDLTKVHTE |
| | | CCHGDLLECADDRADLAKYICENQDSISSKLKECCEKPLLEKSHCIAEVENDEMP |
| | | ADLPSLAADFVESKDVCKNYAEAKDVFLGMFLYEYARRHPDYSVVLLLRLAKTYE |
| | | TTLEKCCAAADPHECYAKVFDEFKPLVEEPQNLIKQNCELFEQLGEYKFQNALLV |
| | | RYTKKVPQVSTPTLVEVSRNLGKVGSKCCKHPEAKRMPCAEDYLSVVLNQLCVL |
| | | HEKTPVSDRVTKCCTESLVNRRPCFSALEVDETYVPKEFNAETFTFHADICTLSE |
| | | KERQIKKQTALVELVKHKPKATKEQLKAVMDDFAAFVEKCCKADDKETCFAEEG |
| | | KKLVACSEPLGMKSGHIQDYQITASSIFRTLNMDMFTWEPRKARLDKQGKVNAW |
| | | TSGHNDQSQWLQVDLLVPTKVTGIITQGAKDFGHVQFVGSYKLAYSNDGEHWT |
| | | VYQDEKQRKDKVFQGNFDNDTHRKNVIDPPIYARHIRILPWSWYGRITLRSELLG |
| | | C |
| 136 | Nucleic acid of | gacatctgcgaccccaatccttgcgagaatggcggcatttgtctgcctggactggccgatggcagcttctcttgtga |
| | 135 | atgccccgatggcttcacagaccccaattgcagctctgtggtggaagtggccagcgacgaggaagaacctaca |
| | | agcgctggcccctgcacacccaatccatgtcataatggcggaacctgcgagatcagcgaggcctacagaggcg |
| | | ataccttcatcggctacgtgtgcaagtgccccagaggcttcaatggcatccactgccagcacaacatcaacgagt |
| | | gcgaggtggaaccatgcaagaacggcggcatctgtaccgacctggtggccaattactcttgcgagtgccctggc |
| | | gagttcatgggcagaaactgccagtacaaggacgcccacaagagcgaggtggcccacagattcaaggacctg |
| | | ggcgaagagaacttcaaggccctggtgctgatcgccttcgctcagtatctccagcagagccctttcgaggaccac |
| | | gtgaagctggtcaacgaagtgaccgagttcgccaagacctgtgtggccgatgagagcgccgagaactgtgaca |
| | | agagcctgcacacactgttcggcgacaagctgtgtaccgtggccacactgagagaaacctacggcgagatggc |
| | | cgactgctgtgccaagcaagagcccgagagaaacgagtgcttcctccagcacaaggatgacaaccccaacct |
| | | gcctagactcgtgcggcctgaagtggatgtgatgtgcaccgcctttcacgacaacgaggaaaccttcctgaagaa |
| | | gtacctgtacgagatcgccagacggcacccctacttttatgcccctgagctgctgttcttcgccaagcggtataagg |
| | | ccgccttcaccgaatgttgccaggccgctgataaggctgcctgtctgctgcctaagctggacgagctgagagatg |
| | | agggcaaagccagctctgccaagcagagactgaaatgcgccagcctccagaagttcggcgagagagcttttaa |
| | | ggcctgggccgttgccagactgagccagagatttcctaaggccgagtttgccgaggtgtccaagctcgtgaccga |
| | | tctgacaaaggtgcacaccgagtgctgtcacggcgatctgctggaatgtgccgacgatagagccgacctggcca |
| | | agtatatctgcgagaaccaggacagcatcagcagcaagctgaaagagtgctgcgagaagcccctgctggaaa |
| | | agtctcactgtatcgccgaagtggaaaacgacgagatgcccgccgatctgccttctctggctgccgatttcgtgga |
| | | aagcaaggatgtgtgcaagaactacgccgaggccaaagatgtgtttctgggcatgtttctgtatgagtacgcccgc |
| | | agacaccccgactattctgtggttctgctgctgcggctggccaagacatacgagacaaccctggaaaaatgctgc |
| | | gccgctgccgatcctcacgagtgttatgccaaggtgttcgacgagttcaagccactggtggaagaaccccagaa |
| | | cctgatcaagcagaactgcgagctgttcgagcagctgggcgagtacaagttccagaatgccctgctcgtgcggta |
| | | caccaagaaagtgcctcaggtgtccacacctacactggttgaggtgtcccggaatctgggcaaagtgggcagca |
| | | agtgttgcaagcaccctgaggccaagagaatgccttgcgccgaggattacctgagcgtggtgctgaatcagctgt |
| | | gcgtgctgcacgagaaaacccctgtgtccgacagagtgaccaagtgctgtaccgagagcctcgtgaacagaag |
| | | gccttgctttagcgccctggaagtggacgagacatacgtgcccaaagagttcaacgccgagacattcaccttcca |
| | | cgccgatatctgcaccctgtccgagaaagagcggcagatcaagaagcagacagccctggtcgagctggttaag |
| | | cacaagcccaaggccaccaaagaacagctgaaggccgtgatggacgacttcgccgcctttgtcgagaagtgct |
| | | gcaaggccgacgacaaagagacatgcttcgccgaagagggcaagaaactggtggcctgttctgagccactgg |
| | | gcatgaagtctggccacatccaggattaccagatcaccgccagcagcatcttcagaaccctgaacatggatatgt |
| | | tcacctgggagccccggaaggccagactggataagcagggaaaagtgaacgcctggaccagcggccacaat |
| | | gaccagtctcagtggctgcaagtggacctgctggtgcctaccaaagtgaccggcatcatcacacagggcgcaa |
| | | aggatttcggccacgtgcagtttgtgggcagctacaagctggcctacagcaacgatggcgagcactggacagtgt |
| | | accaggacgagaagcagcggaaggataaggtgttccagggcaacttcgacaacgacacccaccggaagaa |
| | | cgtgatcgaccctcctatctacgcccggcacatcagaatcctgccttggtcttggtacggccggatcaccctgaga |
| | | agcgagctgcttggatgt |
| 137 | EGF_HSA[A626- | LDICSKNPCHNGGLCEEISQEVRGDVFPSYTCTCLKGYAGNHCETKDAHKSEVA |
| | L633]removed_ | HRFKDLGEENFKALVLIAFAQYLQQSPFEDHVKLVNEVTEFAKTCVADESAENCD |
| | C2 | KSLHTLFGDKLCTVATLRETYGEMADCCAKQEPERNECFLQHKDDNPNLPRLVR |
| | | PEVDVMCTAFHDNEETFLKKYLYEIARRHPYFYAPELLFFAKRYKAAFTECCQAA |
| | | DKAACLLPKLDELRDEGKASSAKQRLKCASLQKFGERAFKAWAVARLSQRFPKA |
| | | EFAEVSKLVTDLTKVHTECCHGDLLECADDRADLAKYICENQDSISSKLKECCEK |
| | | PLLEKSHCIAEVENDEMPADLPSLAADFVESKDVCKNYAEAKDVFLGMFLYEYAR |
| | | RHPDYSVVLLLRLAKTYETTLEKCCAAADPHECYAKVFDEFKPLVEEPQNLIKQN |
| | | CELFEQLGEYKFQNALLVRYTKKVPQVSTPTLVEVSRNLGKVGSKCCKHPEAKR |
| | | MPCAEDYLSVVLNQLCVLHEKTPVSDRVTKCCTESLVNRRPCFSALEVDETYVP |
| | | KEFNAETFTFHADICTLSEKERQIKKQTALVELVKHKPKATKEQLKAVMDDFAAFV |
| | | EKCCKADDKETCFAEEGKKLVACANPLGLKNNSIPDKQITASSSYKTWGLHLFS |
| | | WNPSYARLDKQGNFNAWVAGSYGNDQWLQVDLGSSKEVTGIITQGARNFGSV |
| | | QFVASYKVAYSNDSANWTEYQDPRTGSSKIFPGNWDNHSHKKNLFETPILARYV |
| | | RILPVAWHNRIALRLELLGC |
| 138 | Nucleic acid of | ctggacatctgtagcaagaacccttgccacaacggcggcctgtgcgaagagatttctcaagaagtgcggggcga |
| | 137 | cgttttccccagctacacctgtacatgtctgaagggctacgccggcaaccactgcgagacaaaggatgcccaca |
| | | agagcgaggtggcccacagattcaaggatctgggcgaagagaacttcaaggccctggtgctgatcgccttcgct |
| | | cagtatctccagcagagccctttcgaggaccacgtgaagctggtcaacgaagtgaccgagttcgccaagacctg |
| | | tgtggccgatgagagcgccgagaactgtgataagagcctgcacaccctgttcggcgacaagctgtgtacagtgg |
| | | ccacactgagagaaacctacggcgagatggccgactgctgtgccaagcaagagcccgagagaaacgagtgc |
| | | ttcctccagcacaaggacgacaaccccaacctgcctagactcgtgcgacccgaagtggatgtgatgtgcaccgc |
| | | ctttcacgacaacgaggaaaccttcctgaagaagtacctgtacgagatcgccagacggcacccctacttttatgcc |
| | | cctgagctgctgttcttcgccaagcggtataaggccgccttcaccgaatgttgccaggccgctgataaggctgcctg |
| | | tctgctgcctaagctggacgagctgagagatgagggcaaagccagctctgccaagcagagactgaaatgcgcc |
| | | agcctccagaagttcggcgagagagcttttaaggcctgggccgttgccagactgagccagagatttcctaaggcc |
| | | gagtttgccgaggtgtccaagctcgtgaccgatctgacaaaggtgcacaccgagtgctgtcacggcgatctgctg |
| | | gaatgtgccgacgatagagccgacctggccaagtacatctgcgagaaccaggacagcatcagcagcaagctg |
| | | aaagagtgctgcgagaagcccctgctggaaaagtctcactgtatcgccgaggtggaaaacgacgagatgcctg |
| | | ccgatctgcctagcctggctgccgatttcgtggaaagcaaggacgtgtgcaagaactacgccgaggccaaggat |
| | | gtgtttctgggcatgtttctgtatgagtacgcccgcagacaccccgactattctgtggttctgctgctgcggctggcca |
| | | aaacctacgagacaaccctggaaaaatgctgcgccgctgccgatcctcacgagtgttatgccaaggtgttcgac |
| | | gagttcaagcctctggtggaagaaccccagaacctgatcaagcagaactgcgagctgttcgagcagctgggcg |
| | | agtacaagttccagaatgccctgctcgtgcggtacaccaagaaagtgcctcaggtgtccacacctacactggttg |
| | | aggtgtcccggaatctgggcaaagtgggcagcaagtgttgcaagcaccctgaggccaagagaatgccttgcgc |
| | | cgaggattacctgagcgtggtgctgaatcagctgtgcgtgctgcacgagaaaacccctgtgtccgacagagtgac |
| | | caagtgctgtaccgagagcctcgtgaacagaaggccttgctttagcgccctggaagtggacgagacatacgtgc |
| | | ccaaagagttcaacgccgagacattcaccttccacgccgacatctgcaccctgtccgagaaagagcggcagat |
| | | caagaagcagacagccctggtcgagctggttaagcacaagcccaaggccaccaaagaacagctgaaggcc |
| | | gtgatggacgacttcgccgcctttgtcgagaagtgctgcaaggccgacgacaaagagacatgcttcgccgaaga |
| | | gggcaagaaactggtggcctgtgctaaccctctgggcctgaagaacaacagcatccccgataagcagatcacc |
| | | gccagcagcagctataagacatggggcctgcacctgttcagctggaacccttcttacgccagactggacaagca |
| | | gggcaacttcaatgcttgggtggccggcagctacggcaatgatcagtggctgcaagtggacctgggcagcagca |
| | | aagaagtgacaggcatcatcacccagggcgcaagaaatttcggcagcgtgcagttcgtggccagctacaaggt |
| | | ggcctacagcaacgatagcgccaactggaccgagtatcaggaccctagaaccggcagctccaagatcttcccc |
| | | ggcaactgggacaaccacagccacaagaagaatctgttcgagacacccatcctggccagatacgtgcggattc |
| | | tgcctgtggcctggcacaacagaatcgccctgagactggaactgctgggctgt |
| 139 | EGF_HSA[A626 | LDICSKNPCHNGGLCEEISQEVRGDVFPSYTCTCLKGYAGNHCETKDAHKSEVA |
| | -L633] | HRFKDLGEENFKALVLIAFAQYLQQSPFEDHVKLVNEVTEFAKTCVADESAENCD |
| | | KSLHTLFGDKLCTVATLRETYGEMADCCAKQEPERNECFLQHKDDNPNLPRLVR |
| | | PEVDVMCTAFHDNEETFLKKYLYEIARRHPYFYAPELLFFAKRYKAAFTECCQAA |
| | | DKAACLLPKLDELRDEGKASSAKQRLKCASLQKFGERAFKAWAVARLSQRFPKA |
| | | EFAEVSKLVTDLTKVHTECCHGDLLECADDRADLAKYICENQDSISSKLKECCEK |
| | | PLLEKSHCIAEVENDEMPADLPSLAADFVESKDVCKNYAEAKDVFLGMFLYEYAR |
| | | RHPDYSVVLLLRLAKTYETTLEKCCAAADPHECYAKVFDEFKPLVEEPQNLIKQN |
| | | CELFEQLGEYKFQNALLVRYTKKVPQVSTPTLVEVSRNLGKVGSKCCKHPEAKR |
| | | MPCAEDYLSVVLNQLCVLHEKTPVSDRVTKCCTESLVNRRPCFSALEVDETYVP |
| | | KEFNAETFTFHADICTLSEKERQIKKQTALVELVKHKPKATKEQLKAVMDDFAAFV |
| | | EKCCKADDKETCFAEEGKKLVA |
| 140 | Nucleic acid of | ctggacatctgtagcaagaacccttgccacaacggcggcctgtgcgaagagatttctcaagaagtgcggggcga |
| | 139 | cgttttccccagctacacctgtacatgtctgaagggctacgccggcaaccactgcgagacaaaggatgcccaca |
| | | agagcgaggtggcccacagattcaaggatctgggcgaagagaacttcaaggccctggtgctgatcgccttcgct |
| | | cagtatctccagcagagccctttcgaggaccacgtgaagctggtcaacgaagtgaccgagttcgccaagacctg |
| | | tgtggccgatgagagcgccgagaactgtgataagagcctgcacaccctgttcggcgacaagctgtgtacagtgg |
| | | ccacactgagagaaacctacggcgagatggccgactgctgtgccaagcaagagcccgagagaaacgagtgc |
| | | ttcctccagcacaaggacgacaaccccaacctgcctagactcgtgcgacccgaagtggatgtgatgtgcaccgc |
| | | ctttcacgacaacgaggaaaccttcctgaagaagtacctgtacgagatcgccagacggcacccctacttttatgcc |
| | | cctgagctgctgttcttcgccaagcggtataaggccgccttcaccgaatgttgccaggccgctgataaggctgcctg |
| | | tctgctgcctaagctggacgagctgagagatgagggcaaagccagctctgccaagcagagactgaaatgcgcc |
| | | agcctccagaagttcggcgagagagcttttaaggcctgggccgttgccagactgagccagagatttcctaaggcc |
| | | gagtttgccgaggtgtccaagctcgtgaccgatctgacaaaggtgcacaccgagtgctgtcacggcgatctgctg |
| | | gaatgtgccgacgatagagccgacctggccaagtacatctgcgagaaccaggacagcatcagcagcaagctg |
| | | aaagagtgctgcgagaagcccctgctggaaaagtctcactgtatcgccgaggtggaaaacgacgagatgcctg |
| | | ccgatctgcctagcctggctgccgatttcgtggaaagcaaggacgtgtgcaagaactacgccgaggccaaggat |
| | | gtgtttctgggcatgtttctgtatgagtacgcccgcagacaccccgactattctgtggttctgctgctgcggctggcca |
| | | aaacctacgagacaaccctggaaaaatgctgcgccgctgccgatcctcacgagtgttatgccaaggtgttcgac |
| | | gagttcaagcctctggtggaagaaccccagaacctgatcaagcagaactgcgagctgttcgagcagctgggcg |
| | | agtacaagttccagaatgccctgctcgtgcggtacaccaagaaagtgcctcaggtgtccacacctacactggttg |
| | | aggtgtcccggaatctgggcaaagtgggcagcaagtgttgcaagcaccctgaggccaagagaatgccttgcgc |
| | | cgaggattacctgagcgtggtgctgaatcagctgtgcgtgctgcacgagaaaacccctgtgtccgacagagtgac |
| | | caagtgctgtaccgagagcctcgtgaacagaaggccttgctttagcgccctggaagtggacgagacatacgtgc |
| | | ccaaagagttcaacgccgagacattcaccttccacgccgacatctgcaccctgtccgagaaagagcggcagat |
| | | caagaagcagacagccctggtcgagctggttaagcacaagcccaaggccaccaaagaacagctgaaggcc |
| | | gtgatggacgacttcgccgcctttgtcgagaagtgctgcaaggccgacgacaaagagacatgcttcgccgaaga |
| | | gggcaagaaactggtggct |
| 141 | PS binding | CVEPLGLENGNIANSQIAASSVRVTFLGLQHWVPELARLNRAGMVNAWTPSSND |
| | MFG-E8 C1 | DNPWIQVNLLRRMWVTGVVTQGASRLASHEYLKAFKVAYSLNGHEFDFIHDVNK |
| | | KHKEFVGNWNKNAVHVNLFETPVEAQYVRLYPTSCHTACTLRFELLGCELNG |
| 142 | PS binding | CVEPLGMENGNIANSQIAASSVRVTFLGLQHWVPELARLNRAGMVNAWTPSSN |
| | MFG-E8 [L76M] | DDNPWIQVNLLRRMWVTGVVTQGASRLASHEYLKAFKVAYSLNGHEFDFIHDVN |
| | 01 | KKHKEFVGNWNKNAVHVNLFETPVEAQYVRLYPTSCHTACTLRFELLGCELNG |
| 143 | PS binding | CANPLGLKNNSIPDKQITASSSYKTWGLHLFSWNPSYARLDKQGNFNAWVAGS |
| | MFG-E8 02 | YGNDQWLQVDLGSSKEVTGIITQGARNFGSVQFVASYKVAYSNDSANWTEYQD |
| | | PRTGSSKIFPGNWDNHSHKKNLFETPILARYVRILPVAWHNRIALRLELLGC |
| 144 | PS binding | CSGPLGIEGGIISNQQITASSTHRALFGLQKWYPYYARLNKKGLINAWTAAENDR |
| | EDIL-3 C1 | WPWIQINLQRKMRVTGVITQGAKRIGSPEYIKSYKIAYSNDGKTWAMYKVKGTNE |
| | | DMVFRGNIDNNTPYANSFTPPIKAQYVRLYPQVCRRHCTLRMELLGCELSG |
| 145 | PS binding | CSEPLGMKSGHIQDYQITASSIFRTLNMDMFTWEPRKARLDKQGKVNAWTSGH |
| | EDIL-3 C2 | NDQSQWLQVDLLVPTKVTGIITQGAKDFGHVQFVGSYKLAYSNDGEHWTVYQD |
| | | EKQRKDKVFQGNFDNDTHRKNVIDPPIYARHIRILPWSWYGRITLRSELLGCTEE |
| | | E |
| 146 | PS binding | CSEPLGMKSGHIQDYQITASSIFRTLNMDMFTWEPRKARLDKQGKVNAWTSGH |
| | EDIL-3 C2 | NDQSQWLQVDLLVPTKVTGIITQGAKDFGHVQFVGSYKLAYSNDGEHWTVYQD |
| | TEEE truncated | EKQRKDKVFQGNFDNDTHRKNVIDPPIYARHIRILPWSWYGRITLRSELLGC |
| 147 | FP133 protein | LDICSKNPCHNGGLCEEISQEVRGDVFPSYTCTCLKGYAGNHCETKGSDAHKSE |
| = 117 | sequence | VAHRFKDLGEENFKALVLIAFAQYLQQSPFEDHVKLVNEVTEFAKTCVADESAEN |
| | | CDKSLHTLFGDKLCTVATLRETYGEMADCCAKQEPERNECFLQHKDDNPNLPRL |
| | | VRPEVDVMCTAFHDNEETFLKKYLYEIARRHPYFYAPELLFFAKRYKAAFTECCQ |
| | | AADKAACLLPKLDELRDEGKASSAKQRLKCASLQKFGERAFKAWAVARLSQRFP |
| | | KAEFAEVSKLVTDLTKVHTECCHGDLLECADDRADLAKYICENQDSISSKLKECC |
| | | EKPLLEKSHCIAEVENDEMPADLPSLAADFVESKDVCKNYAEAKDVFLGMFLYEY |
| | | ARRHPDYSVVLLLRLAKTYETTLEKCCAAADPHECYAKVFDEFKPLVEEPQNLIK |
| | | QNCELFEQLGEYKFQNALLVRYTKKVPQVSTPTLVEVSRNLGKVGSKCCKHPEA |
| | | KRMPCAEDYLSVVLNQLCVLHEKTPVSDRVTKCCTESLVNRRPCFSALEVDETY |
| | | VPKEFNAETFTFHADICTLSEKERQIKKQTALVELVKHKPKATKEQLKAVMDDFA |
| | | AFVEKCCKADDKETCFAEEGKKLVAASQAALGLGGSGGSGGSGGSCVEPLGM |
| | | ENGNIANSQIAASSVRVTFLGLQHWVPELARLNRAGMVNAWTPSSNDDNPWIQ |
| | | VNLLRRMWVTGVVTQGASRLASHEYLKAFKVAYSLNGHEFDFIHDVNKKHKEFV |
| | | GNWNKNAVHVNLFETPVEAQYVRLYPTSCHTACTLRFELLGCELNG |
| 148 | FP133 Nucleic | ctggacatctgtagcaagaacccttgccacaacggcggcctgtgcgaagagatttctcaagaagtgcggggcga |
| | acid sequence | cgttttccccagctacacctgtacatgtctgaagggctacgccggcaaccactgcgagacaaaaggatctgatgc |
| | | ccacaagagcgaggtggcccacagattcaaggatctgggcgaagagaacttcaaggccctggtgctgatcgcc |
| | | ttcgctcagtatctccagcagagccctttcgaggaccacgtgaagctggtcaacgaagtgaccgagttcgccaag |
| | | acctgtgtggccgatgagagcgccgagaactgtgataagagcctgcacaccctgttcggcgacaagctgtgtac |
| | | agtggccacactgagagaaacctacggcgagatggccgactgctgtgccaagcaagagcccgagagaaacg |
| | | agtgcttcctccagcacaaggacgacaaccccaacctgcctagactcgtgcgacccgaagtggatgtgatgtgc |
| | | accgcctttcacgacaacgaggaaaccttcctgaagaagtacctgtacgagatcgccagacggcacccctacttt |
| | | tatgcccctgagctgctgttcttcgccaagcggtataaggccgccttcaccgaatgttgccaggccgctgataaggc |
| | | tgcctgtctgctgcctaagctggacgagctgagagatgagggcaaagccagctctgccaagcagagactgaaat |
| | | gcgccagcctccagaagttcggcgagagagcttttaaggcctgggccgttgccagactgagccagagatttccta |
| | | aggccgagtttgccgaggtgtccaagctcgtgaccgatctgacaaaggtgcacaccgagtgctgtcacggcgat |
| | | ctgctggaatgtgccgacgatagagccgacctggccaagtacatctgcgagaaccaggacagcatcagcagc |
| | | aagctgaaagagtgctgcgagaagcccctgctggaaaagtctcactgtatcgccgaggtggaaaacgacgag |
| | | atgcctgccgatctgcctagcctggctgccgatttcgtggaaagcaaggacgtgtgcaagaactacgccgaggc |
| | | caaggatgtgtttctgggcatgtttctgtatgagtacgcccgcagacaccccgactattctgtggttctgctgctgcgg |
| | | ctggccaaaacctacgagacaaccctggaaaaatgctgcgccgctgccgatcctcacgagtgttatgccaaggt |
| | | gttcgacgagttcaagcctctggtggaagaaccccagaacctgatcaagcagaactgcgagctgttcgagcagc |
| | | tgggcgagtacaagttccagaatgccctgctcgtgcggtacaccaagaaagtgcctcaggtgtccacacctacac |
| | | tggttgaggtgtcccggaatctgggcaaagtgggcagcaagtgttgcaagcaccctgaggccaagagaatgcct |
| | | tgcgccgaggattacctgagcgtggtgctgaatcagctgtgcgtgctgcacgagaaaacccctgtgtccgacaga |
| | | gtgaccaagtgctgtaccgagagcctcgtgaacagaaggccttgctttagcgccctggaagtggacgagacata |
| | | cgtgcccaaagagttcaacgccgagacattcaccttccacgccgacatctgcaccctgtccgagaaagagcgg |
| | | cagatcaagaagcagacagccctggtcgagctggttaagcacaagcccaaggccaccaaagaacagctgaa |
| | | ggccgtgatggacgacttcgccgcctttgtcgagaagtgctgcaaggccgacgacaaagagacatgcttcgccg |
| | | aagagggcaagaaactggtggctgcctctcaggctgctctcggacttggtggaagcggaggaagtggtggatct |
| | | ggcggatcttgtgtggaacccctcggcatggaaaacggcaatatcgccaatagccagattgccgccagcagcgt |
| | | cagagtgacatttctgggactgcaacactgggtgcccgagctggctagactgaatagagccggcatggtcaacg |
| | | cctggacacccagcagcaacgacgataatccctggattcaagtgaacctgctgcggcgtatgtgggtcacaggt |
| | | gttgttacacagggcgcaagcagactggccagccacgagtatctgaaggcctttaaggtggcctacagcctgaa |
| | | cggccacgagttcgacttcatccacgacgtgaacaagaagcacaaagagtttgtcggcaactggaacaagaac |
| | | gccgtgcacgtgaacctgttcgagacacctgtggaagcccagtacgtgcggctgtaccctacaagctgtcacacc |
| | | gcctgcactctgagattcgaactgctgggatgcgagctgaacggc |

The present application also includes variants of each of SEQ ID NOs: 69, 70 and 72, wherein the EGF-like domain of EDIL3 sequence included therein corresponds to any one of the following sequences: SEQ ID NO: 96, SEQ ID NO: 97, SEQ ID NO: 98, SEQ ID NO: 99, SEQ ID NO: 100, or SEQ ID NO: 101.
The present application also includes therapeutic fusion protein comprising the integrin binding domains of MFGE8 or EDIL3, and a truncated PS binding domains such as a truncated variant of IgSF V domain of TIM4 or a truncated variant of the GLA domain of the bridging protein GAS6 variants.

### Modification of the Proteins of the Present Disclosure

[0130] The present application includes variants of the proteins described herein and/or fragments thereof having various modifications in domains as well as fusions and conjugates of the disclosed molecules. For example, a domain of the therapeutic fusion protein may have conservative modification of amino acid residues, and wherein the modified proteins retain or have enhanced properties as compared to a fusion protein comprising the parent domain. Alternatively, a domain of the therapeutic fusion protein may have a deletion(s) of amino acid residues, wherein the modified fusion proteins retain or have enhanced properties as compared to the protein comprising the parent domain. Alternatively, the therapeutic fusion proteins may have an insertion(s) of amino acid residues, wherein the modified proteins retain or have enhanced properties as compared to the unmodified protein. In one embodiment, such an amino acid insertion includes glycine or serine residues in a number of combinations to function as a linker between domains of the parent protein.

[0131] Site-directed mutagenesis or PCR-mediated mutagenesis can be performed to introduce the mutation(s) and the effect on integrin and/or PS binding, or other functional property of interest, can be evaluated in in vitro or in vivo assays. Conservative modifications (as discussed above) can be introduced and/or the mutations may be amino acid substitutions, additions or deletions. Moreover, typically no more than one, two, three, four or five residues within a binding domain are altered.

[0132] Amino acid sequence variants of the therapeutic fusion proteins, which have essentially similar properties as unmodified variants, can be prepared by introducing appropriate nucleotide changes into the encoding DNAs, or by synthesis of the desired variants. Such variants include, for example, deletions from, or insertions or substitutions of, residues within the amino acid sequences of present molecules. In some embodiments, variants may include additional linker sequences, reduced linker sequences or removal of linker sequences, and/or amino acid mutations or substitutions and deletion of one or more amino acids. Any combination of deletion, insertion and substitution is made to arrive at the final construct, provided that the final construct possesses the desired characteristics. The amino acid changes also may alter post-translational processes of the molecules, such as changing the number or position of possible glycosylation sites.

### Methods of Producing Recombinant Molecules

### Nucleic Acids and Expression Systems

[0133] In one embodiment, the present application provides a method of producing one or more polypeptide chains of the therapeutic fusion protein recombinantly, comprising: 1) producing one or more DNA constructs comprising a nucleic acid molecule encoding a polypeptide chain of the multi-specific binding molecule; 2) introducing said DNA construct(s) into one or more expression vectors; 3) co-transfecting said expression vector(s) in one or more host cells; and 4) expressing and assembling the molecule in a host cell or in solution.

[0134] In this respect, the disclosure provides isolated nucleic acids, e.g., one or more polynucleotides, encoding the therapeutic fusion proteins described herein. Nucleic acid molecules include DNA and RNA in both single-stranded and double-stranded form, as well as the corresponding complementary sequences. The nucleic acid molecules of the invention include full-length genes or cDNA molecules as well as a combination of fragments thereof. The nucleic acids of the invention are derived from human sources but the invention includes those derived from non-human species.

[0135] An ‘isolated nucleic acid’ is a nucleic acid that has been separated from adjacent genetic sequences present in the genome of the organism from which the nucleic acid was isolated, in the case of nucleic acids isolated from naturally-occurring sources. In the case of nucleic acids synthesized enzymatically from a template or chemically, such as PCR products, cDNA molecules, or oligonucleotides for example, it is understood that the nucleic acids resulting from such processes are isolated nucleic acids. An isolated nucleic acid molecule refers to a nucleic acid molecule in the form of a separate fragment or as a component of a larger nucleic acid construct. In one preferred embodiment, the nucleic acids are substantially free from contaminating endogenous material. The nucleic acid molecule has preferably been derived from DNA or RNA isolated at least once in substantially pure form and in a quantity or concentration enabling identification, manipulation, and recovery of its component nucleotide sequences by standard biochemical methods (such as those outlined in Sambrook et al., Molecular Cloning: A Laboratory Manual, 2nd ed., Cold Spring Harbor Laboratory, Cold Spring Harbor, N.Y. (1989)). Such sequences are preferably provided and/or constructed in the form of an open reading frame uninterrupted by internal non-translated sequences, or introns, that are typically present in eukaryotic genes. Sequences of non-translated DNA can be present 5′ or 3′ from an open reading frame, where the same do not interfere with manipulation or expression of the coding region.

[0136] The present invention also provides expression systems and constructs in the form of plasmids, expression vectors, transcription or expression cassettes, which comprise at least one polynucleotide as described above. In addition, the invention provides host cells comprising such expression systems or constructs.

[0137] In one embodiment, the present disclosure provides a method of preparing a therapeutic fusion protein comprising the steps of: (a) culturing a host cell comprising a nucleic acid encoding the fusion protein, wherein the cultured host cell expresses the fusion protein; and (b) recovering the fusion protein from the host cell culture.

[0138] Also provided in the disclosure are expression vectors and host cells for producing the therapeutic fusion proteins described above. The term “vector” means any molecule or entity (e.g. nucleic acid, plasmid, bacteriophage or virus) that is suitable for transformation or transfection of a host cell and contains nucleic acid sequences that direct and/or control (in conjunction with the host cell) expression of one or more heterologous coding regions operatively linked thereto. Various expression vectors can be employed to express the polynucleotides encoding chains or binding domains of the molecule. Both viral-based and non-viral expression vectors can be used to produce the therapeutic fusion protein in a mammalian host cell. Non-viral vectors and systems include plasmids, episomal vectors, typically with an expression cassette for expressing a protein or RNA, and human artificial chromosomes (see, e.g., Harrington et al., (1997) Nat Genet 15: 345). For example, non-viral vectors useful for expression of the polynucleotides and polypeptides in mammalian (e.g., human) cells include pThioHis A, B & C, pcDNA3.1/His, pEBVHis A, B & C, (Invitrogen, San Diego, Calif.), MPSV vectors, and numerous other vectors known in the art for expressing other proteins. Useful viral vectors include vectors based on retroviruses, adenoviruses, adeno associated viruses, herpes viruses, vectors based on SV40, papilloma virus, HBP Epstein Barr virus, vaccinia virus vectors and Semliki Forest virus (SFV). See, Brent et al., (1995) supra; Smith, Annu. Rev. Microbiol. 49: 807; and Rosenfeld et al., (1992) Cell 68: 143.

[0139] The choice of expression vector depends on the intended host cells in which the vector is to be expressed. Typically, the expression vectors contain a promoter and other regulatory sequences (e.g., enhancers) that are operably linked to the polynucleotides encoding a therapeutic fusion protein. In some embodiments, an inducible promoter is employed to prevent expression of inserted sequences except under inducing conditions. Inducible promoters include, e.g., arabinose, lacZ, metallothionein promoter or a heat shock promoter. Cultures of transformed organisms can be expanded under non-inducing conditions without biasing the population for coding sequences whose expression products are better tolerated by the host cells. In addition to promoters, other regulatory elements may also be required or desired for efficient expression of the therapeutic fusion proteins. These elements typically include an ATG initiation codon and adjacent ribosome binding site or other sequences. In addition, the efficiency of expression may be enhanced by the inclusion of enhancers appropriate to the cell system in use (see, e.g., Scharf et al., (1994) Results Probl. Cell Differ. 20: 125; and Bittner et al., (1987) Meth. Enzymol., 153:516). For example, the SV40 enhancer or CMV enhancer may be used to increase expression in mammalian host cells.

[0140] The expression vectors may also provide a secretion signal sequence position to form a fusion protein with polypeptides encoded by inserting the above-described sequences of binding domains and/or solubilizing domains. More often, the inserted sequences are linked to signal sequences before inclusion in the vector. Vectors that allow expression of the binding domains and solubilizing domain as fusion proteins thereby lead to production of intact engineered proteins. A host cell, when cultured under appropriate conditions, can be used to express an engineered protein that can subsequently be collected from the culture medium (if the host cell secretes it into the medium) or directly from the host cell producing it (if it is not secreted). The selection of an appropriate host cell will depend upon various factors, such as desired expression levels, polypeptide modifications that are desirable or necessary for activity (such as glycosylation or phosphorylation) and ease of folding into a biologically active molecule. A host cell may be eukaryotic or prokaryotic.

[0141] Mammalian cell lines available as hosts for expression are known in the art and include, but are not limited to, immortalized cell lines available from the American Type Culture Collection (ATCC) and any cell lines used in an expression system known in the art can be used to make the recombinant fusion proteins of the invention. In general, host cells are transformed with a recombinant expression vector that comprises DNA encoding a desired fusion protein. Among the host cells that may be employed are prokaryotes, yeast or higher eukaryotic cells. Prokaryotes include gram negative or gram positive organisms, for example E. coli or bacilli. Higher eukaryotic cells include insect cells and established cell lines of mammalian origin. Examples of suitable mammalian host cell lines include the COS-7 cells, L cells, Cl27 cells, 3T3 cells, Chinese hamster ovary (CHO) cells, or their derivatives and related cell lines which grow in serum free media, HeLa cells, BHK cell lines, the CV-1 EBNA cell line, human embryonic kidney (HEK) cells such as 293, 293 EBNA or MSR 293, human epidermal A431 cells, human Colo205 cells, other transformed primate cell lines, normal diploid cells, cell strains derived from in vitro culture of primary tissue, primary explants, HL-60, U937, HaK or Jurkat cells. Optionally, mammalian cell lines such as HepG2/3B, KB, NIH 3T3 or S49, for example, can be used for expression of the polypeptide when it is desirable to use the polypeptide in various signal transduction or reporter assays. Alternatively, it is possible to produce the polypeptide in lower eukaryotes such as yeast or in prokaryotes such as bacteria. Suitable yeasts include P. pastoris, S. cerevisiae, S. pombe, Kluyveromyces strains, Candida, or any yeast strain capable of expressing heterologous polypeptides. Suitable bacterial strains include E. coli, B. subtilis, S. typhimurium, or any bacterial strain capable of expressing heterologous polypeptides. If the fusion protein is made in yeast or bacteria, it may be desirable to modify the product produced therein, for example by phosphorylation or glycosylation of the appropriate sites, in order to obtain a functional product. Such covalent attachments can be accomplished using known chemical or enzymatic methods.

[0142] Methods for introducing expression vectors containing the polynucleotide sequences of interest vary depending on the type of cellular host. For example, calcium chloride transfection is commonly utilized for prokaryotic cells, whereas calcium phosphate treatment or electroporation may be used for other cellular hosts. Other methods include, e.g., electroporation, calcium phosphate treatment, liposome-mediated transformation, injection and microinjection, ballistic methods, virosomes, immunoliposomes, polycation:nucleic acid conjugates, naked DNA, artificial virions, fusion to the herpes virus structural protein VP22, agent-enhanced uptake of DNA, and ex vivo transduction. For long-term, high-yield production of recombinant proteins, stable expression will often be desired. For example, cell lines which stably express engineered proteins can be prepared using expression vectors of the disclosure which contain viral origins of replication or endogenous expression elements and a selectable marker gene. Following the introduction of the vector, cells may be allowed to grow for 1-2 days in an enriched media before they are switched to selective media. The purpose of the selectable marker is to confer resistance to selection, and its presence allows growth of cells which successfully express the introduced sequences in selective media. Resistant, stably transfected cells can be proliferated using tissue culture techniques appropriate to the cell type.

[0143] The fusion proteins are typically recovered from the culture medium as a secreted polypeptide, although they may also be recovered from host cell lysate when directly produced without a secretory signal. If the polypeptide is membrane-bound, it can be released from the membrane using a suitable detergent solution (e.g., Triton-X 100).

[0144] When the fusion protein is produced in a recombinant cell other than one of human origin, it is completely free of proteins or polypeptides of human origin. However, it is necessary to purify the fusion protein from recombinant cell proteins or polypeptides. As a first step, the culture medium or lysate is normally centrifuged to remove particulate cell debris. The produced molecules can be conveniently purified by hydroxylapatite chromatography, gel electrophoresis, dialysis, or affinity chromatography, with affinity chromatography being the preferred purification technique. Other techniques for protein purification such as fractionation on an ion-exchange column, ethanol precipitation, reverse phase HPLC, chromatography on silica, chromatography on heparin Sepharose, chromatography on an anion or cation exchange resin (such as a polyaspartic acid column), chromatofocusing, SDS-PAGE, and ammonium sulfate precipitation are also available.

[0145] In certain aspects, provided herein is a viral vector comprising a polynucleotide encoding a therapeutic fusion protein of the present invention. In some embodiments, the viral vector is derived from AAV. In certain some embodiments, the viral vector is administered to a subject, e.g., a human, wherein the therapeutic fusion protein is expressed, and can be used for the treatment of and/or prevention of the diseases as listed herein.

### Pharmaceutical Compositions

[0146] In another aspect, the present disclosure provides a composition, e.g., a pharmaceutical composition, containing a therapeutic fusion protein of the present invention, in combination with one or more pharmaceutically acceptable excipient, diluent or carrier. Such compositions may include one or a combination of (e.g., two or more different) therapeutic fusion proteins of the disclosure.

[0147] Pharmaceutical compositions as described herein can also be administered in combination therapy, i.e., combined with other agents. For example, the combination therapy can include a fusion protein of the present disclosure combined with, for example, at least one anti-inflammatory, anti-infective agent or immunosuppressant agent. Examples of therapeutic agents that can be used in combination therapy are described in greater detail below in the section on uses of the therapeutic fusion proteins of the disclosure.

[0148] To prepare pharmaceutical or sterile compositions including a fusion protein of the present disclosure, the fusion protein is mixed with a pharmaceutically acceptable carrier or excipient.

[0149] The phrase ‘pharmaceutically acceptable’ means approved by a regulatory agency of a federal or a state government, or listed in the U.S. Pharmacopeia or other generally recognized pharmacopeia for use in animals, and more particularly, in humans.

[0150] The term ‘pharmaceutical composition’ refers to a mixture of at least one active ingredient (e.g., an engineered protein) and at least one pharmaceutically acceptable excipient, diluent or carrier.

[0151] A ‘medicament’ refers to a substance used for medical treatment.

[0152] As used herein, ‘pharmaceutically acceptable carrier’ includes any and all solvents, dispersion media, coatings, antibacterial and antifungal agents, isotonic and absorption delaying agents, and the like that are physiologically compatible. The carrier should be suitable for intravenous, intramuscular, subcutaneous, parenteral, spinal or epidermal administration (e.g., by injection or infusion). In one embodiment, the carrier should be suitable for subcutaneous route. Depending on the route of administration, the active compound, i.e. fusion protein, may be coated in a material to protect the compound from the action of acids and other natural conditions that may inactivate the compound.

[0153] The pharmaceutical compositions as described herein may include one or more pharmaceutically acceptable salts. A pharmaceutical composition as described herein may also include a pharmaceutically acceptable anti-oxidant. Examples of pharmaceutically acceptable antioxidants include: water soluble antioxidants, such as ascorbic acid, cysteine hydrochloride, sodium bisulfate, sodium metabisulfite, sodium sulfite and the like; oil-soluble antioxidants, such as ascorbyl palmitate, butylated hydroxyanisole (BHA), butylated hydroxytoluene (BHT), lecithin, propyl gallate, alpha-tocopherol, and the like; and metal chelating agents, such as citric acid, ethylenediamine tetraacetic acid (EDTA), sorbitol, tartaric acid, phosphoric acid, and the like.

[0154] Examples of suitable aqueous and nonaqueous carriers that may be employed in the pharmaceutical compositions as described herein include water, ethanol, polyols (such as glycerol, propylene glycol, polyethylene glycol, and the like), and suitable mixtures thereof, vegetable oils, such as olive oil, and injectable organic esters, such as ethyl oleate. Proper fluidity can be maintained, for example, by the use of coating materials, such as lecithin, by the maintenance of the required particle size in the case of dispersions, and by the use of surfactants.

[0155] These compositions may also contain adjuvants such as preservatives, wetting agents, emulsifying agents and dispersing agents. Prevention of presence of microorganisms may be ensured both by sterilization procedures and by the inclusion of various antibacterial and antifungal agents, for example, paraben, chlorobutanol, phenol sorbic acid, and the like. It may also be desirable to include isotonic agents, such as sugars, sodium chloride, and the like into the compositions. In addition, prolonged absorption of the injectable pharmaceutical form may be brought about by the inclusion of agents which delay absorption such as, aluminum monostearate and gelatin.

[0156] Pharmaceutically acceptable carriers include sterile aqueous solutions or dispersions and sterile powders for the extemporaneous preparation of sterile injectable solutions or dispersion. The use of such media and agents for pharmaceutically active substances is known in the art. Except insofar as any conventional media or agent is incompatible with the active compound, use thereof in the pharmaceutical compositions of the invention is contemplated. Supplementary active compounds can also be incorporated into the compositions.

[0157] Therapeutic compositions typically must be sterile and stable under the conditions of manufacture and storage. The composition can be formulated as a solution, microemulsion, liposome, or other ordered structure suitable to high drug concentration. The carrier can be a solvent or dispersion medium containing, for example, water, ethanol, polyol (for example, glycerol, propylene glycol, and liquid polyethylene glycol, and the like), and suitable mixtures thereof. The proper fluidity can be maintained, for example, by the use of a coating such as lecithin, by the maintenance of the required particle size in the case of dispersion and by the use of surfactants. In many cases, one can include isotonic agents, for example, sugars, polyalcohols such as mannitol, sorbitol, or sodium chloride in the composition.

[0158] Reviews on the development of stable protein formulations may be found in Cleland et al., (1993) Crit Reviews Ther Drug Carrier Systems, 10(4): 307-377 and Wei W (1999) Int J Pharmaceutics, 185: 129-88.

[0159] Solutions or suspensions used for intradermal or subcutaneous application typically include one or more of the following components: a sterile diluent such as water for injection, saline solution, fixed oils, polyethylene glycols, glycerin, propylene glycol or other synthetic solvents, antibacterial agents such as benzyl alcohol or methyl parabens, antioxidants such as ascorbic acid or sodium bisulfite, chelating agents such ethylenediaminetetraacetic acid, buffers such as acetates, citrates or phosphates, and agents for the adjustment of tonicity such as sodium chloride or dextrose. The pH can be adjusted with acids or bases, such as hydrochloric acid or sodium hydroxide. Such preparations may be enclosed in ampoules, disposables syringes or multiple dose vials made of glass or plastic.

[0160] Sterile injectable solutions can be prepared by incorporating the active compound in the required amount in an appropriate solvent with one or a combination of ingredients enumerated above, as required, followed by sterilization microfiltration. Generally, dispersions are prepared by incorporating the fusion proteins of the invention into a sterile vehicle that contains a basic dispersion medium and the required other ingredients from those enumerated above. In the case of sterile powders for the preparation of sterile injectable solutions, the methods of preparation are vacuum drying and freeze-drying (lyophilization) that yield a powder of the active ingredient plus any additional desired ingredient from a previously sterile-filtered solution thereof.

[0161] The amount of active ingredient which can be combined with a carrier material to produce a single dosage form will vary depending upon the subject being treated, and the particular mode of administration. The amount of active ingredient which can be combined with a carrier material to produce a single dosage form will generally be that amount of the composition which produces a therapeutic effect. Generally, out of one hundred percent, this amount will range from about 0.01 percent to about ninety-nine percent of active ingredient, from about 0.1 percent to about 70 percent, or from about 1 percent to about 30 percent of active ingredient in combination with a pharmaceutically acceptable carrier.

[0162] Selecting an administration regimen for a therapeutic engineered protein depends on several factors, including the serum or tissue turnover rate of the entity, the level of symptoms, the immunogenicity of the entity, and the accessibility of the target cells in the biological matrix. In certain embodiments, an administration regimen maximizes the amount of therapeutic delivered to the patient consistent with an acceptable level of side effects. Accordingly, the amount of protein delivered depends in part on the particular entity and the severity of the condition being treated. Guidance in selecting appropriate doses of biologic and small molecules are available (see, e.g., Bach (ed.) (1993) Monoclonal Antibodies and Peptide Therapy in Autoimmune Diseases, Marcel Dekker, New York, N.Y.; Baert, et al. (2003) New Engl. J. Med. 348:601-608; Milgrom, et al. (1999) New Engl. J. Med. 341:1966-1973; Slamon, et al. (2001) New Engl. J. Med. 344:783-792; Beniaminovitz, et al. (2000) New Engl. J. Med. 342:613-619; Ghosh, et al. (2003) New Engl. J. Med. 348:24-32; Lipsky, et al. (2000) New Engl. J. Med. 343:1594-1602).

[0163] Determination of the appropriate dose is made by the clinician, e.g., using parameters or factors known or suspected in the art to affect treatment or predicted to affect treatment. Generally, the dose begins with an amount somewhat less than the optimum dose and it is increased by small increments thereafter until the desired or optimum effect is achieved relative to any negative side effects. Important diagnostic measures include those of symptoms of, e.g., the inflammation or level of inflammatory cytokines produced.

[0164] Actual dosage levels of the active ingredients in the pharmaceutical compositions of the present disclosure may be varied so as to obtain an amount of the active ingredient which is effective to achieve the desired therapeutic response for a particular patient, composition, and mode of administration, without being toxic to the patient. The selected dosage level will depend upon a variety of pharmacokinetic factors including the activity of the particular compositions of the present disclosure employed, the route of administration, the time of administration, the rate of excretion of the particular compound being employed, the duration of the treatment, other drugs, compounds and/or materials used in combination with the particular compositions employed, the age, sex, weight, condition, general health and prior medical history of the patient being treated, and like factors known in the medical arts.

[0165] Dosage regimens are adjusted to provide the optimum desired response. For example, a single bolus may be administered, several divided doses may be administered over time or the dose may be proportionally reduced or increased as indicated by the exigencies of the therapeutic situation. It is especially advantageous to formulate parenteral compositions in dosage unit form for ease of administration and uniformity of dosage. Dosage unit form as used herein refers to physically discrete units suited as unitary dosages for the subjects to be treated; each unit contains a predetermined quantity of active compound calculated to produce the desired therapeutic effect in association with the required pharmaceutical carrier. The specification for the dosage unit forms of the invention are dictated by and directly dependent on the unique characteristics of the active compound and the particular therapeutic effect to be achieved, and the limitations inherent in the art of compounding such an active compound for the treatment of sensitivity in individuals.

[0166] For administration of the therapeutic fusion protein, the dosage ranges from about 0.0001 to 150 mg/kg, such as 5, 15, and 50 mg/kg subcutaneous administration, and more usually 0.01 to 5 mg/kg, of the host body weight. An exemplary treatment regime entails administration once per week, once every two weeks, once every three weeks, once every four weeks, once per month, once every 3 months or once every three to 6 months.

[0167] Therapeutic fusion proteins of the invention may be administered on multiple occasions. Intervals between single dosages can be, for example, weekly, monthly, every three months or yearly. Intervals can also be irregular as indicated by measuring blood levels of engineered protein in the patient. In some methods, dosage is adjusted to achieve a plasma protein concentration of about 1-1000 μg/ml and in some methods about 25-300 μg/ml.

[0168] Alternatively, the therapeutic fusion protein can be administered as a sustained release formulation, in which case less frequent administration is required. Dosage and frequency vary depending on the half-life of the protein in the patient and can vary depending on whether the treatment is prophylactic or therapeutic. In prophylactic applications, a relatively low dosage is administered at relatively infrequent intervals over a long period of time. Some patients may continue to receive treatment for the rest of their lives. In therapeutic applications, a relatively high dosage at relatively short intervals is sometimes required until progression of the condition or disease is reduced or terminated or until the patient shows partial or complete amelioration of symptoms of the condition or disease. Thereafter, the patient can be administered a prophylactic regime.

[0169] Actual dosage levels of the active ingredients in the pharmaceutical compositions of the present invention may be varied so as to obtain an amount of the active ingredient which is effective to achieve the desired therapeutic response for a particular patient, composition, and mode of administration, without being toxic to the patient. The selected dosage level will depend upon a variety of pharmacokinetic factors including the activity of the particular compositions of the present disclosure employed, the route of administration, the time of administration, the rate of excretion of the particular compound being employed, the duration of the treatment, other drugs, compounds and/or materials used in combination with the particular compositions employed, the age, sex, weight, condition, general health and prior medical history of the patient being treated, and like factors well known in the medical arts.

[0170] A ‘therapeutically effective dosage’ of a fusion protein of the invention can result in a decrease in severity of a condition or symptoms or a disease and/or a prevention of impairment or disability due to the condition.

[0171] A composition of the present disclosure can be administered by one or more routes of administration using one or more of a variety of methods known in the art. As will be appreciated by the skilled artisan, the route and/or mode of administration will vary depending upon the desired results. Routes of administration for engineered proteins of the invention include intravenous, intramuscular, intradermal, intraperitoneal, subcutaneous, spinal or other parenteral routes of administration, for example by injection or infusion. The phrase ‘parenteral administration’ as used herein means modes of administration other than enteral and topical administration, usually by injection, and includes, without limitation, intravenous, intramuscular, intraarterial, intrathecal, intracapsular, intraorbital, intracardiac, intradermal, intraperitoneal, transtracheal, subcutaneous, subcuticular, intraarticular, subcapsular, subarachnoid, intraspinal, epidural and intrastemal injection and infusion.

[0172] Alternatively, a therapeutic fusion protein of the invention can be administered by a non-parenteral route, such as a topical, epidermal or mucosal route of administration.

[0173] The therapeutic fusion proteins of the disclosure can be prepared with carriers that will protect the proteins against rapid release, such as a controlled release formulation, including implants, transdermal patches, and microencapsulated delivery systems. Biodegradable, biocompatible polymers can be used, such as ethylene vinyl acetate, polyanhydrides, polyglycolic acid, collagen, polyorthoesters, and polylactic acid. Methods for the preparation of such formulations are patented or generally known to those skilled in the art. See, e.g., Sustained and Controlled Release Drug Delivery Systems, J. R. Robinson, ed., Marcel Dekker, Inc., New York, 1978.

[0174] In certain embodiments, the therapeutic fusion proteins of the invention can be formulated to ensure proper distribution in vivo. For example, the blood-brain barrier (BBB) excludes many highly hydrophilic compounds. To ensure that the therapeutic compounds of the invention cross the BBB (if desired), they can be formulated, for example, in liposomes. For methods of manufacturing liposomes, see, e.g., U.S. Pat. Nos. 4,522,811; 5,374,548; and 5,399,331. The liposomes may comprise one or more moieties which are selectively transported into specific cells or organs, thus enhance targeted drug delivery (see, e.g., Ranade V V (1989) J. Clin. Pharmacol.,

### Therapeutic Uses and Methods of the Invention

[0175] The therapeutic fusion proteins of the present invention have in vitro and in vivo diagnostic and therapeutic utilities. For example, these molecules can be administered to cells in culture, e.g. in vitro, or in a subject, e.g., in vivo, to treat, prevent or diagnose a variety of disorders. The methods are particularly suitable for treating, preventing or diagnosing acute or chronic inflammatory and immune system-driven organ and micro-vascular disorders.

[0176] The therapeutic fusion proteins of the invention, whilst not being limited to, are useful for the treatment, prevention, or amelioration of acute and chronic inflammatory organ injuries, in particular inflammatory injuries where endogenous homeostatic clearance mechanisms or efferocytosis pathways for the removal of dying cells, cell fragments and prothrombotic/proinflammatory microparticles are significantly downregulated. Examples of acute inflammatory organ injuries include myocardial infarction, acute kidney injury (AKI), acute stroke and inflammation and organ injuries resulting from ischemia/reperfusion such as ischemia/reperfusion of the gastrointestinal tract, liver, spleen, lung, kidney, pancreas, heart, brain, spinal cord and/or crushed limb.

[0177] The therapeutic fusion proteins of the disclosure may also be useful for the diagnosis, treatment, prevention, or amelioration of inhibiting or slowing blood coagulation, microbiome treatment, Inflammatory bowel disease (IBD), fatty acid uptake and/or decreasing gastric motility, microthrombi-dependent disorders, atherosclerosis, cardiac remodeling, tissue fibrosis, acute liver injury, chronic liver diseases, non-alcoholic steatohepatitis (NASH), vascular diseases, age-related vascular disorders, intestinal diseases, sepsis, bone disorders, cancer, Thalassemia, pancreatitis, hepatitis, endocarditis, pneumonia, acute lung injury, osteoarthritis, periodontitis, tissue trauma-induced inflammation, colitis, diabetes, hemorrhagic shock, transplant rejection, radiation-induced damage, splenomegaly, sepsis-induced AKI or multi-organ failure, acute burns, adult respiratory distress syndrome, wound healing, tendon repair and neurological diseases.

[0178] In one embodiment, neurological diseases may be selected from conditions having a neuro-psychiatric, neuroinflammatory and/or neurodegenerative component including symptoms such as sickness syndromes, nausea, passive avoidance, suppression of behavioral agility, memory disturbance and memory dysfunction. Examples of neurological diseases include amyloid-beta related neurological diseases such as Alzheimer's disease, Parkinson's disease, and depression.

[0179] In one embodiment, bone disorders may be selected from conditions including osteoporosis, osteomalacia, ostersclerosis and osteopetrosis. More particularly, administration of a fusion protein of the present disclosure may inhibit expression of at least one osteoclast marker, such as NFATc1, cathepsin K and αvβ3 integrin. In one embodiment, the administration inhibits osteoclastogenesis. In another embodiment, the administration inhibits RANKL-induced osteoclastogenesis. In yet another embodiment, the administration inhibits bone resorption. In still another embodiment, the administration inhibits expression of at least one bone resorption stimulator, such as a bone resorption stimulator comprising TNF, IL-6, IL-17A, MMP-9, Ptgs2, RANKL, Tnfsf11, CXCL1, CXCL2, CXCL3, CXCL5, and combinations thereof. In another embodiment, the administration inhibits expression of at least one pro inflammatory cytokine selected from the group consisting of IL-8 and CCL2/MCP-1.

[0180] In one embodiment, tissue fibrosis may be fibrosis in the liver, lung, diaphragm, kidney, brain, heart in which the fusion protein of the invention reduces collagen expression. In one embodiment, the lung fibrosis is interstitial pulmonary fibrosis (IPF). In one embodiment the liver fibrosis is liver cirrhosis, which may or may not be attributable to NASH.

[0181] Multiple respiratory diseases feature accumulation of apoptotic cells. Furthermore, defective efferocytosis and phagocytosis by macrophages in Chronic Obstructive Pulmonary Disorder (COPD) are associated with exacerbations and severity. The therapeutic fusion proteins of the disclosure may also be useful for the diagnosis, treatment, prevention, or amelioration of respiratory diseases, such as Acute Respiratory Distress Syndrome, or COPD. The therapeutic fusion proteins of the disclosure may also be useful for the diagnosis, treatment, prevention, or amelioration of Acute Lung Injury (ALI), e.g. lung injury induced by inhalation or aspiration of toxic exogenous or endogenous compounds or drugs; lung injury caused by lung edema, shock, pancreatitis, burns, traumata of thorax or polytraumata, radiation, sepsis, pathogens (bacteria, viruses or parasites such as plasmodia); Chronic pulmonary insufficiency diseases leading to hypoxemia.

[0182] The therapeutic fusion proteins of the disclosure may also be useful for the diagnosis, treatment, prevention, or amelioration of severity of lung injury caused by viruses of the Cornona type, e.g. SARS-CoV, SARS-CoV-2, or MERS-CoV. In one embodiment, the therapeutic fusion proteins of the disclosure are provided for the use in treatment of SARS-CoV-2 infection in COVID 19 patients.

[0183] The therapeutic fusion proteins of the disclosure may also be useful for the diagnosis, treatment, prevention, or amelioration of severity of transfusion associated lung insufficiency (TRALI).

[0184] The therapeutic fusion proteins of the disclosure may also be useful for the diagnosis, treatment, prevention, or amelioration of severity of chronic pulmonary insufficiency diseases leading to hypoxemia.

[0185] The therapeutic fusion proteins of the disclosure, e.g. the therapeutic fusion proteins contains a domain of EDIL3 of the disclosure, may also be useful for the diagnosis, treatment, prevention, or amelioration of severity of postoperative peritoneal adhesions.

[0186] The therapeutic fusion proteins of the disclosure may also be useful for the diagnosis, treatment, prevention, or amelioration of severity of heart failure.

[0187] The therapeutic fusion proteins of the disclosure may also be useful for the diagnosis, treatment, prevention, or amelioration of severity of hemodialysis.

[0188] The therapeutic fusion proteins of the disclosure may also be useful for the diagnosis, treatment, prevention, or amelioration of severity of delayed graft function or of graft versus host disease.

[0189] The therapeutic fusion proteins of the disclosure may also be useful for the diagnosis, treatment, prevention, or amelioration of severity of severe frostbites, trench foot, pyoderma gangraenosum/gangrene.

[0190] The therapeutic fusion proteins of the disclosure may also be useful for the diagnosis, treatment, prevention, or amelioration of severity of pathologies induced by bacteria, fungi, viruses or parasits (for example, sepsis or other pathologies directly induced by the pathogens such as in anthrax, plague, Necrotizing soft-tissue infections (NSTIs such as necrotizing fasciitis) osteomyelitis, malaria).

[0191] The therapeutic fusion proteins of the disclosure may also be useful for the diagnosis, treatment, prevention, or amelioration of severity of trauma/polytraumata caused by injury-causing accidents, such as work accidents, falls, traffic accidents, ballistic and combat injury or other injury mechanisms.

[0192] The therapeutic fusion proteins of the disclosure may also be useful for the diagnosis, treatment, prevention, or amelioration of severity of osteoclast mediated pathology.

[0193] The therapeutic fusion proteins of the disclosure may be administered as the sole active ingredient or in conjunction with, e.g. as an adjuvant to or in combination to, other drugs e.g. immunosuppressive or immunomodulating agents or other anti-inflammatory agents or e.g. cytotoxic or anti-cancer agents, e.g. for the treatment or prevention of diseases mentioned above.

[0194] Administered ‘in combination’, in reference to an additional therapeutic agent, means that two (or more) different treatments are delivered to the subject during the course of the subject's affliction with the disorder, e.g., the two or more treatments are delivered after the subject has been diagnosed with the disorder and before the disorder has been cured or eliminated or treatment has ceased for other reasons. In some embodiments, the delivery of one treatment is still occurring when the delivery of the second begins, so that there is overlap in terms of administration. This is sometimes referred to herein as “simultaneous” or “concurrent delivery”. In other embodiments, the delivery of one treatment ends before the delivery of the other treatment begins. In some embodiments of either case, the treatment is more effective because of combined administration. For example, the second treatment is more effective, e.g., an equivalent effect is seen with less of the second treatment, or the second treatment reduces symptoms to a greater extent, than would be seen if the second treatment were administered in the absence of the first treatment, or the analogous situation is seen with the first treatment. In some embodiments, delivery is such that the reduction in a symptom, or other parameter related to the disorder is greater than what would be observed with one treatment delivered in the absence of the other. The effect of the two treatments can be partially additive, wholly additive, or greater than additive. The delivery can be such that an effect of the first treatment delivered is still detectable when the second is delivered.

[0195] The term ‘concurrently’ is not limited to the administration of therapies (e.g., prophylactic or therapeutic agents) at exactly the same time, but rather it is meant that a pharmaceutical composition comprising therapeutic fusion proteins thereof of the present disclosure are administered to a subject in a sequence and within a time interval such that the fusion proteins can act together with the additional therapeutic agent(s) to provide an increased benefit than if they were administered otherwise. For example, each therapy may be administered to a subject at the same time or sequentially in any order at different points in time; however, if not administered at the same time, they should be administered sufficiently close in time so as to provide the desired therapeutic or prophylactic effect. Each therapy can be administered to a subject separately, in any appropriate form and by any suitable route.

[0196] A therapeutic fusion protein as described herein, and the additional therapeutic agent(s) can be administered simultaneously, in the same or in separate pharmaceutical composition as the disclosed fusion protein, or sequentially. For sequential administration, the fusion protein as described herein, can be administered first, and the additional agent can be administered second, or the order of administration can be reversed. The additional therapeutic agent(s) may be administered to a subject by the same or different routes of administration compared to the fusion protein.

[0197] The therapeutic fusion protein as described herein, and/or additional therapeutic agent(s), procedures or modalities can be administered during periods of active disorder, or during a period of remission or less active disease. The therapeutic fusion protein as described herein, can be administered before the other treatment, concurrently with the treatment, post-treatment, or during remission of the disorder.

[0198] When administered in combination, the therapeutic fusion protein as described herein, and the additional therapeutic agent (e.g., second or third agent), or all, can be administered in an amount or dose that is higher, lower or the same than the amount or dosage of each agent used individually, e.g., as a monotherapy. In certain embodiments, the therapeutic fusion protein as described herein, the additional agent (e.g., second or third agent), or all, is lower (e.g., at least 20%, at least 30%, at least 40%, or at least 50%) than the amount or dosage of each agent used individually, e.g., as a monotherapy. In other embodiments, the amount or dosage of the therapeutic fusion protein as described herein, the additional agent (e.g., second or third agent), or all, that results in a desired effect (e.g., treatment of an inflammatory disease or condition) is lower (e.g., at least 20%, at least 30%, at least 40%, or at least 50% lower) than the amount or dosage of each agent used individually, e.g., as a monotherapy, required to achieve the same therapeutic effect.

[0199] For example, the therapeutic fusion proteins of the disclosure may be used in combination with DMARD, e.g. Gold salts, sulphasalazine, anti-malarias, methotrexate, D-penicillamine, azathioprine, mycophenolic acid, tacrolimus, sirolimus, minocycline, leflunomide, glucocorticoids; a calcineurin inhibitor, e.g. cyclosporin A or FK 506; a modulator of lymphocyte recirculation, e.g. FTY720 and FTY720 analogs; a mTOR inhibitor, e.g. rapamycin, 40-O-(2-hydroxyethyl)-rapamycin, CCI779, ABT578, AP23573 or TAFA-93; an ascomycin having immuno-suppressive properties, e.g. ABT-281, ASM981, etc.; corticosteroids; cyclophosphamide; azathioprine; leflunomide; mizoribine; mycophenolate mofetil; 15-deoxyspergualine or an immunosuppressive homologue, analogue or derivative thereof; immunosuppressive monoclonal antibodies, e.g., monoclonal antibodies to leukocyte receptors, e.g., MHC, CD2, CD3, CD4, CD7, CD8, CD25, CD28, CD40. CD45, CD58, CD80, CD86 or their ligands; other immunomodulatory compounds, e.g. a recombinant binding molecule having at least a portion of the extracellular domain of CTLA4 or a mutant thereof, e.g. an at least extracellular portion of CTLA4 or a mutant thereof joined to a non-CTLA4 protein sequence, e.g. CTLA4lg (for ex. designated ATCC 68629) or a mutant thereof, e.g. LEA29Y; adhesion molecule inhibitors, e.g. LFA-1 antagonists, ICAM-1 or -3 antagonists, VCAM-4 antagonists or VLA-4 antagonists; or a chemotherapeutic agent, e.g. paclitaxel, gemcitabine, cisplatinum, doxorubicin or 5-fluorouracil; anti TNF agents, e.g. monoclonal antibodies to TNF, e.g. infliximab, adalimumab, CDP870, or receptor constructs to TN F-RI or TNF-RII, e.g. Etanercept, PEG-TNF-RI; blockers of proinflammatory cytokines, IL-1 blockers, e.g. Anakinra or IL-1 trap, canakinumab, IL-13 blockers, IL-4 blockers, IL-6 blockers; chemokines blockers, e.g inhibitors or activators of proteases, e.g. metalloproteases, anti-IL-15 antibodies, anti-IL-6 antibodies, anti-IL-4 antibodies, anti-IL-13 antibodies, anti-CD20 antibodies, NSAIDs, such as aspirin or an anti-infectious agent; damage-associated molecular pattern (DAMP) or pathogen-associated molecular pattern (PAMP) antagonists, e.g. converters, detoxifiers, removers, e.g. ATP converters, HMGB-1 modulators, histone-detoxifiers; inhibitors of superantigen induced immune-responses; complement inhibitors and extracorporal plasmapheresis devices.

### Kits

[0200] Also within the scope of the invention are kits consisting of the compositions e.g., therapeutic fusion proteins of the disclosure, and instructions for use. Such kits comprise a therapeutically effective amount of a fusion protein according to the disclosure. Additionally, such kits may comprise means for administering the therapeutic fusion protein (e.g., an auto injector, a syringe and vial, a prefilled syringe, a prefilled pen) and instructions for use. These kits may contain additional therapeutic agents (described infra) for treating a patient having an autoimmune disease or an inflammatory disorder or AOI. Such kits may also comprise instructions for administration of the therapeutic fusion protein to treat the patient. Such instructions may provide the dose, route of administration, regimen, and total treatment duration for use with the enclosed fusion protein. Kits typically include a label indicating the intended use of the contents of the kit. The term label includes any writing, or recorded material supplied on or with the kit, or which otherwise accompanies the kit. The kit may further comprise tools for diagnosing whether a patient belongs to a group that will respond to treatment with a therapeutic fusion protein of the present invention, as defined above.

### EMBODIMENTS

[0201] The present disclosure provides the following embodiments:
1. A therapeutic multidomain fusion protein comprising a solubilizing domain, wherein the solubilizing domain is located between the domains of the multidomain fusion protein.
2. A therapeutic fusion protein of formula A-S-B (Formula I), wherein
[0202] (i) A is a first domain, or a first set of domains
[0203] (ii) S is a solubilizing domain, and
[0204] (iii) C is a second domain, or a second set of domains,
[0205] and optionally, wherein the multidomain therapeutic fusion protein maintains a major biologic function.
   3. The multidomain fusion protein of embodiment 1 or 2, wherein the solubilizing domain comprises albumin, e.g. human serum albumin (HSA), or a functional variant thereof.
   4. The multidomain fusion protein of embodiment 3, wherein the solubilizing domain is human serum albumin, or a functional variant thereof.
   5. The multidomain fusion protein of embodiment 4, wherein the solubilizing domain is HSA D3.
   6. The multidomain fusion protein of any one of the preceding embodiments, wherein the solubilizing domain is HSA and has an amino acid sequence of SEQ ID NO: 4, or at least 90% sequence identity thereto.
   7. The multidomain fusion protein of any one of the preceding embodiments, wherein the solubilizing domain is linked directly to the first domain, to the second domain or to both domains.
   8. The multidomain fusion protein of any one of the preceding embodiments, wherein the solubilizing domain is linked indirectly to the first domain and/or the second domain by a linker.
   9. The multidomain fusion protein of any one of the preceding embodiments, wherein the first domain is an integrin binding domain, and the second domain is a phosphatidylserine (PS) binding domain. 10. The therapeutic fusion protein of embodiment 9, wherein the integrin binding domain binds to integrins, e.g. binds to αvβ3 and/or αvβ5 and/or α8β1 integrin.
   11. The therapeutic fusion protein of embodiment 9 or embodiment 10, wherein the integrin binding domain comprises a Arginine-Glycine-Aspartic acid (RGD) motif.
   12. The therapeutic fusion protein of any one of embodiment 9 to 11, wherein the integrin binding domain is an EGF-like domain of MFG-E8, EDIL3 or a protein comprising an integrin binding domain listed in Table 1.
   13. The therapeutic fusion protein of any one of embodiments 9 to 12, wherein the PS binding domain is a PS binding domain listed in Table 2 or is a truncated variant of a PS binding domain listed in Table 2.
   14. The therapeutic fusion protein of any one of embodiments 9 to 13, wherein the PS binding domain is the PS binding motif of MFG-E8 or of EDIL3, or a truncated variant thereof.
   15. The fusion protein of embodiment 14, wherein the PS binding domain is the PS binding motif of MFG-E8, or a truncated variant thereof.
   16. The fusion protein of embodiment 13, wherein the PS binding domain is a discoidin domain, or a truncated variant thereof.
   17. The therapeutic fusion protein of any one of embodiments 13 to 16, wherein the truncated PS binging domain comprises any of C1 domain and/or C2 domain of a PS binding domain listed in Table 2.
   18. The therapeutic fusion protein of any one of embodiments 13 to 17, wherein the truncated PS binding domain is a C1 domain.
   19. The therapeutic fusion protein of any one of embodiments 13 to 18, wherein the truncated PS binding domain does not comprise a C2 domain.
   20. The fusion protein of any one of the preceding embodiments, wherein the integrin binding domain has an amino acid sequence of SEQ ID NO: 2, or at least 90% sequence identity thereto.
   21. The fusion protein of any one of the preceding embodiments, wherein the integrin binding domain has an amino acid sequence of SEQ ID NO: 77 or at least 90% sequence identity thereto.
   22. The fusion protein of any one of the preceding embodiments, wherein the integrin binding domain has an amino acid sequence selected from: SEQ ID NO: 96, SEQ ID NO: 97, SEQ ID NO: 98, SEQ ID NO: 99, SEQ ID NO: 100, or SEQ ID NO: 101; or at least 90% sequence identity thereto.
   23. The fusion protein of any one of the preceding embodiments, wherein the PS binding domain has an amino acid sequence of SEQ ID NO: 141 or SEQ ID NO: 142; or at least 90% sequence identity thereto.
   24. The fusion protein of any one of the preceding embodiments, wherein the PS binding domain has an amino acid sequence of SEQ ID NO: 144, or at least 90% sequence identity thereto.
   25. The fusion protein of any one of the preceding embodiments comprising in sequence: an integrin binding domain-HSA-PS binding domain.
   26. A therapeutic fusion protein comprising MFG-E8 and a solubilizing domain, wherein the MFG-E8 comprises from N-terminal to C-terminal: an EGF-like domain, a solubilizing domain, and a C1 domain and/or a C2 domain; and comprises a sequence from wild-type human MFG-E8 (SEQ ID NO: 1) or a functional variant thereof.
   27. The fusion protein of embodiment 26, wherein the solubilizing domain is inserted between the EGF-like domain and the C1 or C2 domain.
   28. The fusion protein of any one of the preceding embodiments, wherein the solubilizing domain is HSA, HSA D3 or Fc-IgG, or a functional variant thereof.
   29. The fusion protein of any one of the preceding embodiments wherein the solubilizing domain comprises human serum albumin (HSA), or a functional variant thereof.
   30. The fusion protein of any one of embodiments 1-29, wherein the protein has an amino acid sequence selected from: SEQ ID NO: 34, SEQ ID NO: 36, SEQ ID NO: 42, SEQ ID NO: 44, SEQ ID NO: 47, SEQ ID NO: 48, SEQ ID NO: 80, SEQ ID NO: 82, SEQ ID NO: 119, SEQ ID NO: 121, SEQ ID NO: 125, SEQ ID NO: 129, SEQ ID NO: 131, SEQ ID NO: 133, SEQ ID NO: 135, SEQ ID NO: 137, or SEQ ID NO: 147; or at least 90% sequence identity thereto.
   31. An isolated nucleic acid encoding the amino acid sequence of embodiment 30.
   32. A cloning or expression vector comprising the nucleic acid according to embodiment 31.
   33. A viral vector comprising the isolated nucleic acid according to embodiment 31, preferably the viral vector comprising the isolated nucleic acid according to embodiment 31 is derived from AAV.
   34. The viral vector according to embodiment 33, wherein the vector is administered to a subject, e.g., a human subject, in need therefor.
   35. The viral vector according to embodiment 33, for use in the treatment and/or prevention of the diseases as listed herein.
   36. A recombinant host cell suitable for the production of a therapeutic fusion protein, comprising one or more cloning or expression vectors according to embodiment 32 and optionally, secretion signals.
   37. The recombinant host cell of embodiment 36, wherein the host cell is e.g. a prokaryotic, yeast, insect or mammalian cell.
   38. The fusion protein of any one of the preceding embodiments, wherein expression of the protein in a host cell results in a yield of at least 10 mg/L.
   39. The fusion protein of any one of the preceding embodiments, wherein expression of the protein in a mammalian cell results in an increase in yield of at least 100 fold over wild-type, e.g. wild-type MFG-E8 (SEQ ID NO: 1).
   40. A pharmaceutical composition comprising the fusion protein of any one of the preceding embodiments, and at least one pharmaceutically acceptable carrier.
   41. A method of treatment or prevention of an inflammatory disorder or inflammatory organ injury in an individual in need thereof, comprising administering to the individual a therapeutically effective amount of the fusion protein of any one of embodiments 1 to 40.
   42. The fusion protein of any one of the preceding embodiments, for use in the treatment or prevention of an inflammatory disorder or inflammatory organ injury in an individual in need thereof.
   43. The method of embodiment 41 or the use of embodiment 42, wherein the inflammatory disorder or inflammatory organ injury is acute kidney injury, sepsis, myocardial infarction, acute stroke, burns, traumatic injury, and inflammatory and organ injuries resulting from ischemia/reperfusion.
   44. The method of embodiment 41 or the use of embodiment 42, wherein the fusion protein is administered in combination with another therapeutic agent.
   45. The method or use of embodiment 44, wherein the another therapeutic agent is an immunosuppressive agent, an immunomodulating agent, an anti-inflammatory agent, an anti-oxidant, an anti-infective agent, a cytotoxic agent or an anti-cancer agent.
   46. A method for the manufacturing of a therapeutic multidomain protein by (i) engineering one or more domains of the multidomain protein to have the desired therapeutic characteristics, and (ii) inserting albumin, e.g. HSA or functional variants thereof, within the domains of the therapeutic protein.
   47. The method of embodiment 46, wherein the solubilizing domain is HSA and has an amino acid sequence of SEQ ID NO: 4, or at least 90% sequence identity thereto.
   48. The multidomain fusion protein of any one of the embodiments 46 or 47, wherein the solubilizing domain is linked directly to the first domain, to the second domain or to both domains.
   49. The multidomain fusion protein of any one of the embodiments 46 or 47, wherein the solubilizing domain is linked indirectly to the first domain and/or the second domain by a linker.
   50. The method of embodiment 46, wherein the therapeutic multidomain protein is the therapeutic multidomain protein according to any one of the preceding embodiments.

[0206] It is to be understood that each embodiment may be combined with one or more other embodiments, to the extent that such a combination is consistent with the description of the embodiments. It is further to be understood that the embodiments provided above are understood to include all embodiments, including such embodiments as result from combinations of embodiments.

[0207] All references cited herein, including patents, patent applications, papers, publications, text books, and the like, and the references cited therein, to the extent that they are not already, are hereby incorporated herein by reference in their entirety.

### EXAMPLES

[0208] The following examples are provided to further illustrate the disclosure but not to limit its scope. Other variants of the disclosure will be readily apparent to one of ordinary skill in the art and are encompassed by the appended claims.

### Example 1: Generation of Fusion Proteins

[0209] MFG-E8 is a multi-domain protein consisting of a N-terminal epidermal growth factor (EGF-like) domain and two C-terminal lectin-type C domains (C1 and C2). Attempts to produce recombinant full-length human protein, as documented in the literature, have shown that the protein aggregates and expression rates are very low (Castellanos et al., (2016) Protein Expression Purification 1124: 10-22). Therefore, in order to try to solubilize the protein and boost its expression, we investigated the effect of fusing a number of proteins to MFG-E8.

[0210] A solubilizing domain (SD) derived from human Fc-IgG1, human serum albumin (HSA) and domain 3 of HSA (HSA D3) were fused in different positions to MFG-E8; at the N- or C-terminus, or in between the EGF and C1 or C1 and C2 domains, as shown schematically in FIG. 1. Furthermore, fusions to Fc-IgG1 or HSA have the potential to extend the half-life of the molecule in vivo, since these proteins bind to FcRn. Fusion of MFG-E8 to Fc-IgG1 or HSA can also enhance the production and solubility (Castellanos et al., (2016) supra) of the fusion protein as is shown in the following examples.

[0211] Table 5 shows the binding of fusion protein FP330 (EGF-HSA-C1-C2; SEQ ID NO: 42) comprising a HSA insert, to human neonatal Fc-receptor (See also Example 5.1).

Table 5: Binding affinity of fusion protein FP330 to human FcRn

### Example 2: Generation of wtMFG-E8 and MFG-E8 HSA Fusions; Expression and Purification

[0212] Methods for generation of fusion proteins are described below; in brief, MFG-E8 and MFG-E8 fusions and EDIL fusions, in particular fusions to HSA, were generated according to the following method.

[0213] DNA was synthesized at GeneArt (Regensburg, Germany) and cloned into a mammalian expression vector using restriction enzyme-ligation based cloning techniques. The resulting plasmid was transfected into HEK293T cells. For transient expression of proteins, vectors for wild-type or engineered chains were transfected into suspension-adapted HEK293T cells using Polyethylenimine (PEI; Cat #24765 Polysciences, Inc.). Typically, 100 ml of cells in suspension at a density of 1-2 Mio cells per ml was transfected with DNA containing 100 μg of expression vectors encoding the engineered chains. The recombinant expression vectors were then introduced into the host cells and the construct produced by further culturing of the cells for a period of 7 days to allow for secretion into the culture medium (HEK, serum-fee medium) supplemented with 0.1% pluronic acid, 4 mM glutamine, and 0.25 μg/ml antibiotic.

[0214] The produced constructs were then purified from cell-free supernatant, using immobilized metal ion affinity chromatography (IMAC), or Protein A capture, or anti-HSA capture chromatography.

[0215] When his-tagged protein was captured by IMAC, filtered conditioned media was mixed with IMAC resin (GE Healthcare), equilibrated with 1% triton and 20 mM NaPO4, 0.5Mn NaCl, 20 mM Imidazole, pH7.0. The resin was washed three times with 15 column volumes of 20 mM NaPO4, 0.5Mn NaCl, 20 mM Imidazole, pH7.0 before the protein was eluted with 10 column volumes elution buffer (20 mM NaPO4, 0.5 Mn NaCl, 500 mM Imidazole, pH7.0).

[0216] When protein was captured by Protein A or anti-HSA chromatography, filtered conditioned media was mixed with Protein A resin (CaptivA PriMab™, Repligen) or anti-HSA resin (Capture Select Human Albumin affinity matrix, Thermo), equilibrated with PBS, pH7.4. The resin was washed three times with 15 column volumes of PBS, pH7.4 before the protein was eluted with 10 column volumes elution buffer (50 mM citrate, 90 mM NaCl, pH 2.5) and pH neutralized using 1M TRIS pH10.0.

[0217] Finally, eluted fractions were polished by using size exclusion chromatography (HiPrep Superdex 200, 16/60, GE Healthcare Life Sciences) and analyzed by SDS-PAGE against a Precision Plus Protein Unstained Standards marker (Biorad, ref #161-0363).

[0218] Representative expression gels for the fusion proteins are shown in FIG. 2: FIG. 2A: EGF-HSA-C1-C2 protein (FP330; SEQ ID NO: 42); FIG. 2B: EGF-HSA-C1-C2 of EDIL3 protein (FP050; SEQ ID NO: 12); FIG. 2C: EGF-Fc(KiH) C1-02 protein non-reduced and reduced. This protein is a heterodimer of FP071 (EGF-Fc(knob)-C1-C2; SEQ ID NO: 18) with Fc-IgG1 hole (SEQ ID NO: 10); FIG. 2D: EGF-HSA-C1 protein (FP260; SEQ ID NO: 34). Protein under reduced and non-reduced conditions is shown in FIG. 2C because heterodimers tend to fall apart under reducing conditions therefore both conditions were tested. Results of expression and the yield following purification for a further set of fusion proteins are shown in Table 6; As can be seen from the expression data, HSA fusions of MFG-E8, even with HSA in different positions, show at least a 100-fold improvement in expression over wtMFG-E8. As is shown in the right hand column of Table 6, HSA fusions of MFG-E8 also show an increase in yield of at least 100-fold over wtMFG-E8.

TABLE 6
Expression and yield of fusion proteins expressed
in a HEK cell line

| | Expression | Final yield |
|---|---|---|
| | post His | after His and |
| Protein | capture (mg/l) | SEC (mg/l) |
| wtMFG-E8 | 0.2 | 0.04 |
| FP220 (HSA-EGF-C1-C2) | 23 | 5.5 |
| FP110 (EGF-C1-C2-HSA) | 34 | 7.8 |
| FP330 (EGF-HSA-C1-C2) | 23 | 4.0 |

[0219] Other examples of therapeutic fusion proteins of the disclosure were generated according to the above method and further analyzed by SDS-PAGE (Sodium dodecyl sulfate polyacrylamide gel electrophoresis), were proteins are separated based on their molecular weight. Each protein was mixed with Laemmli buffer before loading on polyacrylamide gel (Biorad, 4-20% Mini-PROTEAN TGX Stain free). After 30 min migration at 200V in TRIS-Glycine-SDS running buffer, proteins contained in the gel were revealed in a stain-free enabled imager (Biorad, Gel Doc EZ). As described FIG. 2E, SDS-PAGE shows recombinant proteins which have been produced and purified:

| Line 1, 12: | Molecular weight marker (Biorad, Precision plus protein) | | |
|---|---|---|---|
| Line 2: | His6_EGF[MFG-E8]_C1[MFG-E8] | | 23.87 kDa |
| Line 3: | EGF[MFG-E8]_C1[MFG-E8]_His6 | SEQ ID 115 | 23.87 kDa |
| Line 4: | EGF[MFG-E8]_HSA_C1[MFG-E8] | SEQ ID 117 | 90.38 kDa |
| Line 5: | EGF[MFG-E8]_HSA_C1[MFG-E8] | SEQ ID 74 | 89.27 kDa |
| Line 6: | EGF[MFG-E8]_HSA_C1[MFG-E8] | SEQ ID 73 | 88.72 kDa |
| Line 7: | EGF[EDIL3]_HSA_C1[EDIL3] | SEQ ID 71 | 98.22 kDa |
| Line 8: | EGF[EDIL3]_HSA_C2[EDIL3] | SEQ ID 135 | 98.20 kDa |
| Line 9: | EGF[MFG-E8]_HSA_C2[MFG-E8] | SEQ ID 137 | 88.45 kDa |
| Line 10: | EGF[EDIL3]_HSA_C1_C2[MFG-E8] | SEQ ID 80 | 115.67 kDa |
| Line 11: | EGF[MFG-E8]_HSA_C1_C2[EDIL3] | SEQ ID 82 | 107.32 kDa |

### Example 3: Characterization of MFG-E8-HSA Engineered Proteins

### 3.1 Phosphatidylserine Binding (Biochemical)

[0220] L-α-phosphatidylserine (brain, porcine, Avanti 840032, Alabama, US) was dissolved in chloroform, diluted in methanol and coated onto 384-well microtiter plates (Corning™ 3653, Kennebunk Me., US) at 1 μg/mL. After overnight incubation at 4° C., the solvent was evaporated using a SpeedVac™ System (Thermo Scientific™). The plates were treated with phosphate buffered saline (PBS) containing 3% fatty acid-free bovine serum albumin (BSA) at RT for 1.5 h.

[0221] Binding of fusion proteins to L-α-phosphatidylserine was assessed by competing against binding of biotinylated murine MFG-E8/lactadherin (produced in-house, mMFG-E8:biotin). The proteins were diluted in PBS containing 3% fatty acid free BSA, pH 7.4 and incubated with L-α-phosphatidylserine-coated microtiter plates for 30 min. mMFG-E8:biotin in PBS containing 3% fatty acid free BSA, pH 7.4 was added at 1 nM and incubated for additional 30 min. Unbound mMFG-E8:biotin was removed by three washing steps with dissociation-enhanced lanthanide fluorescence immunoassay (DELFIA™) wash buffer (Perkin Elmer 1244-114 MA, US). Europium-labelled streptavidin (Perkin Elmer 1244-360, Wallac Oy, Finland) was added in DELFIA™ Assay buffer (Perkin Elmer 1244-111 MA, US) at RT for 20 min. This was followed by three washing steps with DELFIA™ Assay buffer. Europium was revealed as instructed by manufacturer (Perkin Elmer 1244-105, Boston Mass., US). Time resolved-fluorescence of Europium was quantified with an Envision™ 2103 multi-label plate reader, Perkin Elmer, CT, US). Data analysis was performed using MS Excel and GraphPad Prism software.

[0222] Polypropylene plates are low-protein binding microtiter plates that are typically used in laboratories for serial dilutions. Compared to polystyrene, these plates have the advantage of reducing protein loss during dilutions and are typically classified as “low-protein binding” plates. When dilutions of wtMFG-E8 were made in polypropylene plates, compared to dilutions made in non-binding plates, wtMFG-E8 lost potency in the L-α-phosphatidylserine competition assay. These data, as shown in FIG. 3, suggest that wtMFG-E8 is partially lost during liquid handling and dilution steps when using polypropylene plates which have already been optimized for low protein binding (FIG. 3A). These results indicate that the inherent stickiness of wtMFG-E8 poses a challenge in handling in the laboratory and most likely during drug manufacturing and production, where capture and polish steps are required to produce drug substance with high yield and very high purity. In contrast, the stickiness of the engineered protein FP278 (EGF-HSA-C1-C2-His tag; SEQ ID NO: 44) was drastically reduced compared to wtMFG-E8 and virtually no difference between dilutions performed in non-binding plates versus polypropylene plates was observed (FIG. 3B). These data suggest that inserting a solubilizing domain into the proteins of the present disclosure can improve their technical handling to improve step yield and thus the overall yield during the manufacturing process.

[0223] The assessment of binding of the fusion proteins to L-α-phosphatidylserine is shown in FIG. 4. The engineered MFG-E8-derived protein FP278 (EGF-HSA-C1-C2-His tag; SEQ ID NO: 44) bound to immobilized PS and to a lesser extent to the phospholipid cardiolipin in a concentration dependent manner (FIG. 4A). The binding of FP278 to immobilized L-α-phosphatidylserine or binding to cardiolipin (1,3-bis(sn-3′-phosphatidyl)-sn-glycerol) was detected using an antibody against the EGF-L domain of wtMFG-E8. The binding strength of several recombinant fusion proteins to immobilized L-α-phosphatidylserine is shown in FIG. 4B. Human wtMFG-E8, and the fusion proteins FP278 (EGF-HSA-C1-C2-His tag; SEQ ID NO: 44) and FP260 (EGF-HSA-C1; SEQ ID NO: 34) efficiently competed with binding of 1 nM biotinylated mouse MFG-E8 to immobilized L-α-phosphatidylserine in a concentration-dependent manner. The IC₅₀ values obtained for the fusion proteins signify highly similar L-α-phosphatidylserine-binding strengths of the C1-C2 domains of the engineered protein FP278 (EGF-HSA-C1-C2-His tag; SEQ ID NO: 44) compared to human wtMFG-E8. Surprisingly, these data also suggest that the human C2 domain does not, or only weakly interacts with L-α-phosphatidylserine as shown by the result for FP270 (EGF-HSA-C2; SEQ ID NO: 36), which along with FP250 (EGF-HSA; SEQ ID NO: 32) did not compete in this assay format. FP100, an EGF-C2-C2 protein (SEQ ID NO: 26) was tested and did not compete in this assay format (not shown), leaving the C1 domain as the major PS-binding moiety in human MFG-E8. This finding was surprising as a major body of literature suggests that the C2 domain of MFG-E8 is the major domain responsible for PS binding (Andersen et al., (2000) Biochemistry, 39(20): 6200-6; Shi & Gilbert (2003) Blood, 101: 2628-2636; Shao et al., (2008) J Biol Chem., 283(11): 7230-41). In conclusion, these findings demonstrate that the C1 domain is the major integral PS binding domain of the MFG-E8 engineered proteins and is important for PS-binding dependent functions. As such, the C1 domain may be useful for substitution into heterologous proteins to confer PS binding; however, the highest PS binding was shown for fusion proteins containing a C1-02 or C1-C1 tandem domain (latter not shown).

### 3.2 αv Integrin Adhesion Assay

[0224] Fusion proteins were diluted in phosphate buffered saline (PBS) pH 7.4 and 50 μL of a 24 nM solution was immobilized by adsorption (96 well plate, Nunc Maxisorb) overnight (1.2 nM/well). The plates were subsequently treated with PBS containing 3% fatty acid free bovine serum albumin (BSA) at RT for 1.5 h. αvβ3 integrin-expressing lymphoma cells (ATCC-TIB-48 BW5147.G.1.4, ATCC, US) were cultivated in RPMI 1640 supplemented with GlutaMax, 25 mM HEPES, 10% FBS, Pen/Strep, 1 mM NaPyruvate, 50 μM β-Mercaptoethanol. The cells were split the day before the adhesion experiment. Cells were labelled with 3 μg/mL 2′,7′-bis-(2-carboxyethyl)-5-(and-6)-carboxyfluorescein, acetoxymethyl ester (BCECF AM) (Thermo Fisher Scientific Inc, US) for 30 min. BW5147.G.1.4 cells were resuspended in adhesion buffer (TBS, 0.5% BSA, 1 mM MnCl₂, pH 7.4) and 50000 cells/well were allowed to adhere at RT for 40 min. Non-adherent cells were removed by repeated washing with adhesion buffer. Fluorescence of adherent cells was quantified using an Envision™ 2103 multilabel plate reader, Perkin Elmer, US. Data analysis was performed using MS Excel and GraphPad Prism software.

[0225] Cell adhesion to the immobilized fusion protein FP330 (EGF-HSA-C1-C2; SEQ ID NO: 42) was completely blocked by the αv integrin inhibitor cilengitide or 10 mM EDTA demonstrating integrin-dependent cell adhesion to immobilized engineered protein (FIG. 5A). A single point mutation in the integrin binding motif RGD (RGD>RGE) of the EGF-like domain (FP280; SEQ ID NO: 38) resulted in complete abrogation of cell adhesion demonstrating that a functional and accessible RGD binding motif in the fusion protein is essential for αv integrin-dependent adhesion (FIG. 5B). An immobilized EGF-HSA protein lacking the C1-C2 domains, FP250 (SEQ ID NO: 32) did not, or only marginally, support adhesion of BW5147.G.1.4 cells despite an EGF-like domain (FIG. 5C). This finding suggests that under the tested experimental conditions, the RGD loop in EGF-like domain fused to HSA may be insufficiently accessible to cell surface integrins possibly due to steric reasons. This disturbance was not apparent once C1, C2 or C1-C2 were fused to the EGF-HSA in the C-terminal position. Recombinant proteins of this disclosure, for example, FP330 promote αv-integrin-dependent cell adhesion similar to wtMFG-E8 if expressed in CHO cells or HEK cells (FIG. 5D).

[0226] Taken together, these data demonstrate that fusion proteins of the present disclosure bind to cellular integrins, support integrin-dependent cell adhesion and indicate that in proteins with a HSA domain insert, the C-terminal EGF-like domain may functionally profit from a C-terminally fused protein domain to support integrin binding.

### 3.3 Human Macrophage-Neutrophil Efferocytosis Assay

[0227] Human peripheral blood mononuclear cells (PBMCs) were isolated from buffy coat by means of Ficoll gradient centrifugation (Ficoll®-Paque PLUS, GE Healthcare, Sweden) followed by negative selection of monocytes using a Stemcell isolation kit (Stemcell 19059, Vancouver, Canada). Monocytes were differentiated to “M0” macrophages using recombinant human M-CSF 40 ng/mL (Macrophage Colony Stimulating Factor, R&D Systems, US) in RPMI 1640 containing 25 mM HEPES, 10% FBS, Pen/Strep, 1 mM NaPyr, 50 μM β-Merc for 5 days. One day prior to efferocytosis, macrophages were labeled with PKH26 using the Red Fluorescent Dye Linker kit (Sigma MINI26, US). Cells were resuspended in RPMI 1640 containing 25 mM HEPES, 10% FBS, Pen/Strep, 1 mM NaPyr, 50 μM β-Merc and seeded into black 96-well plates (Corning, US) at 40000 cells/well and allowed to adhere for 20 h.

[0228] Neutrophils: Human neutrophils were isolated from buffy coats by dextran sedimentation in combination with a Ficoll™ density gradient as follows: Plasma of the buffy coat was removed by centrifugation of the diluted buffy coat. Cellular harvest was diluted in 1% dextran (from Leuconostoc spp. MW 450.000-650.000; Sigma, US) and allowed to sediment on ice for 20-30 min.

[0229] Leukocytes from supernatant were harvested and on a Ficoll™-Paque layer (GE Healthcare Sweden). After centrifugation the pellet was harvested and remaining erythrocytes were lysed using red blood cell (RBC) lysis buffer (BioConcept, Switzerland). Neutrophils were washed once in medium (RPMI 1640+GlutaMax containing 25 mM HEPES, 10% FBS, Pen/Strep, 0.1 mM NaPyr, 50 uM b-Merc) and kept overnight at 15° C. Apoptosis/cell death was induced by treatment of neutrophils with 1 μg/mL Superfas Ligand (Enzo Life Sciences, Lausanne, Switzerland) at 37° C. for 3 h. Neutrophils were stained with both Hoechst 33342 (Life technologies, US) for 25 min and with DRAQ5 (eBioscience, UK, diluted 1:2000) at 37° C. in the dark for 5 min.

### Efferocytosis Assay

[0230] M0 macrophages were incubated with the fusion proteins for 30 min. Apoptotic labelled neutrophils were added at a ratio of M0/neutrophil 1:4. Efferocytosis of apoptotic neutrophils by macrophages was visualized taking advantage of the fluorescence intensity increase of DRAQ5 upon localization of neutrophils in the pH-low lysosomal compartment of M0 macrophages.

[0231] Efferocytosis was quantified using an ImageXpress Micro XLS wide field high-content analysis system (Molecular DEVICES. CA, US). Macrophages were identified via PKH26 fluorescence. The efferocytosis index (EI, displayed as %) was calculated as the ratio of macrophages containing at least one ingested apoptotic neutrophil (DRAQ5high) event to the total number of macrophages. Data analysis was performed using MS Excel and GraphPad Prism software.

[0232] The effect of the fusion protein FP278 (EGF-HSA-C1-C2-His tag; SEQ ID NO: 44) on the promotion of efferocytosis of dying neutrophils by human macrophages is shown in FIG. 6. The fusion proteins increase internalization of pHrodo-labelled dying human neutrophils into macrophages over the already high efferocytosis capacity of M0 macrophages, shown as the basal level. In FIG. 7 it is shown that recombinant fusion protein FP278 can rescue endotoxin (lipopolysaccharide)-impaired efferocytosis of dying neutrophils by human macrophages. FIG. 7A shows the impairment of macrophage efferocytosis of dying human neutrophils by 100 pg/ml lipopolysaccharide (LPS) in three human donors. The left panel shows the individual donor response, the right panel shows the mean impairment of efferocytosis (%) of the three donors. FIG. 7B shows the rescue of this endotoxin (LPS)-impaired efferocytosis of dying neutrophils by human macrophages with the fusion protein FP278.

[0233] The rescue of S. aureus particle impaired efferocytosis of dying neutrophils by human macrophages with the fusion protein FP330 is shown in FIG. 8. FIG. 8A shows the effect of a concentration of 100 nM of fusion protein on promoting efferocytosis over the base level (dotted line; left-hand part of figure) as well as the effect of 100 nM fusion protein in rescuing the impairment of efferocytosis caused by the addition of S. aureus (right-hand part of figure). FIG. 8B shows the effect of increasing concentrations of fusion protein FP278 (EC₅₀ 8 nM) on the rescue of impaired efferocytosis caused by the addition of S. aureus, and on the promotion of efferocytosis once the base levels of efferocytosis had been reached.

### 3.4 Human Endothelial—Jurkat Efferocytosis Assay

### Cell Culture

[0234] Human umbilical vein endothelial cells (HUVECs) were obtained from Lonza (Basel, Switzerland). Cells were cultivated in flasks coated with gelatin (from bovine skin, 0.2% final concentration in PBS, dilution of 2% stock solution, Sigma, Germany). Cells were grown with culture medium 199 (Thermo Fischer Scientific, US) supplemented with 10% FBS (GE Healthcare, United Kingdom), 1% Pen/Strep (Thermo Fischer Scientific, US), 1% Glutamax (Thermo Fischer Scientific, US) and 1 ng/mL recombinant Fibroblast Growth Factor-basic (Peprotech, UK). Cells were detached for harvesting or passaging using Accutase™ (Thermo Fischer Scientific, US).

[0235] Jurkat E6-1 cells were obtained from ATCC (American Type Culture Collection, US) and grown in culture medium RPMI 1640 (Thermo Fischer Scientific, US) supplemented with 10% FBS (GE Healthcare, UK), 1% Pen/Strep (Thermo Fischer Scientific, US), 10 mM Sodium Pyruvate (Thermo Fischer Scientific, US) and 10 mM HEPES (4-(2-hydroxyethyl)-1-piperazineethanesulfonic acid, Thermo Fischer Scientific, US).

[0236] Apoptosis of Jurkat E6-1 cells was induced using recombinant human TRAIL (R&D Systems, US). Apoptotic cells were labeled with pHrodo™ Green STP ester dye (Thermo Fischer Scientific, US). Flow cytometry buffer was prepared with PBS (Thermo Fischer Scientific, US) supplemented with 1% FBS (GE Healthcare, United Kingdom), 0.05% w/v sodium azide (Merck, Germany) and 0.5 mM EDTA (Ethylenediaminetetraacetic acid, Thermo Fischer Scientific, US).

### Efferocytosis Assay

[0237] At day 1, HUVECs (confluence 70-90%) were harvested by detachment with Accutase™ for 5 minutes washed with PBS and re-suspended in cell culture medium. Cell numbers and viability were assessed using a Guava EasyCyte flow cytometer (Merck, Germany) and the Guava ViaCount reagent (Merck, Germany) according to manufacturer's instructions. Required amount of cells were centrifuged at 300×g for 5 min at RT and re-suspended in culture medium to allow a cell number of 6.6×10⁴ cells/mL. 150 μL/well of this cell suspension was added to 96-well tissue culture plates (Corning™ US). HUVECs were incubated in incubator at 37° C./5% CO₂/95% humidity for additional 16-20 hours.

[0238] Jurkat E6-1 cell numbers and viability/cell death status were assessed using a Guava EasyCyte flow cytometer (Merck, Germany) and the Guava ViaCount reagent (Merck, Germany) according to manufacturer's instructions. Required amount of cells were centrifuged at 300×g for 5 min at RT and re-suspended at a density of 1×10⁶ cells/mL in culture medium supplemented with recombinant human TRAIL at a final concentration of 50 ng/mL. Cell death was induced at 37° C./5% CO2/95% humidity over-night.

[0239] At day 2, medium was removed from HUVECs by aspiration and 25 μL of fresh pre-warmed (37° C.) culture medium added, followed by the addition of 25 μL fusion protein or controls diluted in pre-warmed (37° C.) culture medium. For dilution non-binding surface (NBS) treated 96-well plates (Corning™ US) were used. The fusion proteins were allowed to interact with HUVECs for 30 min at 37° C./5% CO₂/95% humidity before addition of dying Jurkat cells.

[0240] Apoptotic/dying Jurkat E6-1 cell numbers were counted using a Guava EasyCyte flow cytometer (Merck, Germany) and the Guava ViaCount reagent (Merck, Germany). The required amount of apoptotic cells were centrifuged at 400×g at RT for 5 min and re-suspended at a density of 5×10⁶ cells/mL in RPMI 1640 medium (no FBS) supplemented with pHrodo™ Green STP ester dye at a final concentration of 5 μg/mL (Staining medium). After staining for 10 min at 37° C. remaining reactive pHrodo™ Green STP ester was inactivated with staining medium supplemented with 10% FBS for additional 5 min at 37° C. pHrodo™ Green labelled cells were washed once and cell number was adjusted to 3×10⁶ cells/mL in HUVEC culture medium. 1.5×10⁶/well pHrodo™ Green labeled Jurkat cells were added to HUVECs and incubated at 37° C./5% CO₂/95% humidity for 5 h. Medium was removed, HUVECs were washed once in PBS and detached by 40 μL/well of Accutase™ solution. Cells were harvested by addition of 80 μL of ice-cold flow cytometry buffer, transferred to a 1.5 mL polypropylene 96-well block, washed with an excess of ice-cold flow cytometry buffer and centrifuged at 400×g (4° C.) for 5 min. Supernatants were removed by aspiration and pellets were re-suspended in 80 μL ice-cold flow cytometry buffer and transferred in 96-well V-bottom microtiter plate (BD Biosciences, US). Samples were then measured on a BD LSRFortessa™ flow cytometer (BD Biosciences, US). pHrodo™ Green fluorescence intensity, as an indicator of lysosomal localization of engulfed Jurkat cells, was recorded. Flow cytometry data analysis was performed on using FlowJo™ software. The median fluorescence intensity (MFI) values of pHrodo™ Green signal from singlet-gated HUVECs was used as readout. Data analysis was performed using MS Excel and GraphPad Prism software for EC₅₀ calculation.

[0241] The effect of the fusion proteins FP278 (EGF-HSA-C1-C2-His tag; SEQ ID NO: 44) and FP270 (EGF-HSA-C2; SEQ ID NO: 36) on the promotion of efferocytosis of dying Jurkat cells by HUVEC endothelial cells is shown in FIG. 9. The internalization of pHrodo-labelled dying human Jurkat T cells by HUVECs is potently promoted by the fusion protein FP278. Results demonstrate that endothelial cells are armed by the fusion protein to become efficient phagocytes of dying cells. Surprisingly, the efficacy of the fusion proteins in this assay clearly depends on the presence of a C1-C2 or C1-C1 tandem domain. A fusion protein consisting of EGF-HSA-C2 (FP270), for example is inactive in this experimental setting, as shown in FIG. 9. FIG. 10 demonstrates our highly surprising finding that the location of an HSA domain in the engineered proteins, namely in the N-or C-terminal position (HSA-EGF-C1-C2 (FP220; SEQ ID NO: 30) or EGF-C1-C2-HSA (FP110; SEQ ID NO: 28), respectively), confers efferocytosis blocking ability in the macrophage efferocytosis assay to the MFG-E8 HSA engineered proteins. These data clearly demonstrate the importance to position the HSA domain between the integrin binding and the PS-binding domains for efficient promotion of efferocytosis by the fusion proteins of the present disclosure.

[0242] FIG. 11 shows a comparison of the promotion of endothelial efferocytosis by various formats of fusion proteins comprising combinations of an EGF domain, a C1-C2 domain, HSA or a Fc domain. FIG. 11A shows a comparison of fusion proteins comprising HSA with the HSA positioned at the C-terminal or N-terminal or between the EGF-like and C1-C2 domains; EGF-C1-C2-HSA (FP110; SEQ ID NO: 28), HSA-EGF-C1-C2 (FP220; SEQ ID NO: 30) and EGF-HSA-C1-C2-His tag (FP278; SEQ ID NO: 44), respectively. FIG. 11B shows a comparison of fusion proteins comprising a Fc domain with the Fc positioned at the C-terminal or between the EGF-like and C1 domains. Two formats of Fc moiety are shown: wild type Fc (SEQ ID NO: 7) as found in FP070 (EGF-Fc-C1-C2; SEQ ID NO: 17) and FP080 (EGF-C1-C2-Fc; SEQ ID NO: 22) and Fc moieties with the KiH modifications S354C and T366W on one arm of the Fc (FP060; EGF-C1-C2-Fc [S354C, T366W]; SEQ ID NO: 14) EU numbering (Merchant et al (1998) supra). FIG. 11C shows a comparison of the fusion proteins FP090 (Fc-EGF-C1-C2; SEQ Id NO: 24) comprising a Fc moiety positioned at the N-terminal, for three batches of FP090 at three different concentrations (0.72, 7.2 and 72 nM) compared to wtMFG-E8 control. Efferocytosis of dying Jurkat cells by HUVECs was only promoted by engineered proteins with a HSA or Fc moiety inserted after the EGF-like domain. FIG. 11D shows that the insert of a solubilizing domain can lead to a novel bioactive fusion protein based on the endogenous bridging protein EDIL3, a paralogue of MFG-E8. As shown in FIG. 11D, HSA was inserted between the EGF-like domain and the C1-C2 domain of EDIL3, the paralogue of MFG-E8. This EDIL3 construct (FP050 (EDIL3 based EGF-HSA-C1-C2; SEQ ID NO: 12) has only one (RGD loop-containing) of the 3 EGF-like domains that are found in wtEDIL3. In this construct we surprisingly found a similar toleration of the HSA domain insert with regards to expression of a novel recombinant engineered protein with very high purity (FIG. 2B). In addition it was found surprisingly, that the EDIL3-derived recombinant engineered protein FP050 promoted efferocytosis of dying Jurkat cells by endothelial cells (HUVECS) demonstrating core functionality of a bridging protein and exemplifying that the domains of bridging proteins are useful to design functional novel recombinant engineered proteins.

### Example 4: Efferocytosis of Prothrombotic Plasma Microparticles

### 4.1 Human Endothelial-Microparticle Efferocytosis Assay

### Cell Culture

[0243] HUVEC cells were obtained from Lonza (Basel, Switzerland). Cells were cultured in flasks coated with gelatin (from bovine skin, 0.2% final concentration in PBS, dilution of 2% stock solution, Sigma Aldrich/Merck, Germany). Cells were grown with culture medium 199 (Thermo Fischer Scientific, US) supplemented with 10% FBS (GE Healthcare, United Kingdom), 1% Pen/Strep (Thermo Fischer Scientific, US), 1% Glutamax (Thermo Fischer Scientific, US) and 1 ng/mL recombinant Fibroblast Growth Factor-basic (Peprotech, United Kingdom). Cells were detached for harvesting or passaging using Accutase™ (Thermo Fischer Scientific, US).

[0244] Platelet-derived microparticles were prepared according to following procedure: citrated venous blood was collected (Coagulation 9NC Citrate Monovette, Sarstedt, Germany) from healthy adult volunteers after granted written informed consent. Platelet rich plasma (PRP) was prepared by centrifugation (200×g, 15 minutes, no brake, room temperature). Platelet-derived microparticles/debris were generated by subjecting the PRP to three snap/freeze cycles using liquid nitrogen and thaws at 37° C. Platelet fragments/microparticles were pelleted by centrifugation at 20′000× g for 15 min RT. The pellet was re-suspended in PBS, aliquots were prepared and stored at −80° C. Microparticle preparations were 85-100% PS positive as determined by flow cytometry using Alexa Fluor™ 488-labeled murine MFG-E8/lactadherin (Novartis in-house). Numbers of microparticles were determined using dedicated counting beads (BioCytex/Stago, France). Flow cytometry buffer was prepared with PBS (Thermo Fischer Scientific, US) supplemented with 1% FBS (GE Healthcare, United Kingdom), 0.05% w/v sodium azide (Merck, Germany) and 0.5 mM EDTA (Ethylenediaminetetraacetic acid, Thermo Fischer Scientific, US).

### 4.2 Efferocytosis Assay

[0245] At day 1, HUVEC cells (confluence 70-90%) were harvested by detachment with Accutase™ for 5 min washed with PBS and re-suspended in cell culture medium. Cell numbers and viability were assessed using a Guava EasyCyte flow cytometer (Merck, Germany) and the Guava ViaCount reagent (Merck, Germany) according to manufacturer's instructions. Required amount of cells were centrifuged at 300×g for 5 min at RT and re-suspended in culture medium to allow a cell number of 6.6×10⁴ cells/mL. 150 μL/well of this cell suspension was added to 96-well tissue culture plates (Corning™, US). HUVEC cells were incubated in incubator at 37° C./5% CO2/95% humidity for additional 16-20 hours.

[0246] At day 2, medium was removed from HUVEC cells by aspiration and 25 μL of fresh pre-warmed (37° C.) culture medium added, followed by the addition of 25 μL of the fusion protein FP278 (EGF-HSA-C1-C2-His tag; SEQ ID NO: 44) at three different concentrations: 0.3 nM, 3 nM or 30 nM or control, diluted in pre-warmed (37° C.) culture medium. For dilution non-binding surface (NBS) treated 96-well plates (Corning™, US) were used. The test proteins were allowed to interact with HUVEC cells at 37° C./5% CO₂/95% humidity for 30 min before addition of platelet-derived microparticles.

[0247] Required amount of microparticles were centrifuged for at 20′000× g at 4° C. for 15 min and re-suspended at density of 2×10⁸ particles/mL in RPMI 1640 medium (no FBS) supplemented with pHrodo™ Green STP Ester dye at a final concentration of 5 μg/mL (Staining medium). After staining for 10 min at 37° C. remaining reactive pHrodo™ Green STP ester was inactivated with staining medium supplemented with 10% FBS for additional 5 min at 37° C. pHrodo™ Green labelled microparticles were washed once by centrifugation at 20′000× g at 4° C. for 15 min and number was adjusted to 1×10⁸ particles/mL in HUVEC cell culture medium. 5×10⁶ particles/well pHrodo™ Green labeled microparticles were added to HUVEC cells and incubated at 37° C./5% CO₂/95% humidity for 5 h. Medium was removed, HUVEC cells were washed once in PBS and detached by 40 μL/well of Accutase™ solution. Cells were harvested by addition 80 μL of ice-cold flow cytometry buffer, transferred to a 1.5 mL polypropylene 96-well block, washed with an excess of ice-cold flow cytometry buffer and centrifuged at 400×g (4° C.) for 5 min. Supernatants were removed by aspiration and pellets were re-suspended in 80 μL ice-cold flow cytometry buffer and transferred in 96-well V-bottom microtiter plate (BD Biosciences, US). Samples were measured on a BD LSRFortessa™ flow cytometer (BD Biosciences, US). pHrodo™ Green fluorescence intensity, as an indicator of lysosomal localization of engulfed microparticles, was recorded. Flow cytometry data analysis was performed on using FlowJo™ software. The median fluorescence intensity values (MFI) of pHrodo™ Green signal from singlet-gated HUVEC cells was used as readout. Data analysis was performed using MS Excel and GraphPad Prism software for EC₅₀ calculation. The fusion protein FP278 promoted efferocytosis of platelet-derived microparticles by endothelial cells in a concentration-dependent manner as shown in FIG. 12. The promotion of uptake was concentration-dependent and was also observed in other types of endothelial cells (not shown).

### Example 5: Technical Properties of MFG-E8-HSA Fusion Proteins

### 5.1 Surface Plasmon Resonance (SPR) Binding Analysis of Fusion Protein FP330 to FcRn

[0248] A direct binding assay was performed to characterize the binding of the fusion protein FP330 (EGF-HSA-C1-C2; SEQ ID NO: 42) to FcRn. Kinetic binding affinity constants (KD) were measured on captured protein using recombinant human FcRn as analyte. Measurements were conducted on a BIAcore® T200 (GE Healthcare, Glattbrugg, Switzerland) at room temperature and at pH 5.8 and 7.4, respectively. For affinity measurements, the proteins were diluted in 10 mM NaP, 150 mM NaCl, 0.05% Tween 20, pH5.8 and immobilized on the flow cells of a CM5 research grade sensor chip (GE Healthcare, ref BR-1000-14) using standard procedure according to the manufacturer's recommendation (GE Healthcare). To serve as reference, one flow cell was blank immobilized. Binding data were acquired by subsequent injection of analyte dilutions in series on the reference and measuring flow cell. Zero concentration samples (running buffer only) were included to allow double referencing during data evaluation. For data evaluation, doubled referenced sensorgrams were used and dissociation constants (KD) analyzed.

[0249] The fusion protein FP330 binds to FcRn at pH 5.8 with an affinity of 1380 nM, whereas there was no binding observed at pH 7.4 (See Table 5 above). These results are in good agreement with wild type HSA (1000-2000 nM, at pH 5.8, data not shown).

### 5.2 Differential Scanning Calorimetry (DSC) of MFG-E8 and Variants

[0250] The thermal stability of engineered MFG-E8 protein variant FP278 (EGF-HSA-C1-C2-His tag; SEQ ID NO: 44) was measured using differential scanning calorimetry. Measurements were carried out on a differential scanning micro calorimeter (Nano DSC, TA instruments). The cell volume was 0.5 ml and the heating rate was 1° C./min. The protein was used at a concentration of 1 mg/ml in PBS (pH 7.4). The molar heat capacity of the protein was estimated by comparison with duplicate samples containing identical buffer from which the protein had been omitted. The partial molar heat capacities and melting curves were analysed using standard procedure. Thermograms were baseline corrected and concentration normalized. Two melting events were observed, first Tm was at 50° C., the second Tm at 64° C.

### 5.3 Aggregation Propensity and Solubility Measurements of MFG-E8 Variants

[0251] Firstly, the aggregation propensity of MFG-E8 variant protein FP278 (EGF-HSA-C1-C2-His tag; SEQ ID NO: 44) was measured by dynamic light scattering (DLS, Wyatt). Dynamic light scattering was applied to measure the translational diffusion coefficients of FP278 in solution by quantifying dynamic fluctuations in scattered light. Protein variant size distributions without fractionation, providing polydispersity estimates as well as hydrodynamic radii were measured at a concentration of 1 mg/ml. Hydrodynamic radii of the fusion protein FP278 were determined with a DynaPro™ plate reader (Wyatt Technology Europe GmbH, Dernbach, Germany) combined with the software DYNAMICS (version 7.1.0.25, Wyatt). 50 μL of the undiluted and filtered (0.22 μm PVDF-Filter (Millex® Syringe-driven Filter Unit, Millipore, Billerica, US)) protein solution was measured in a 384-well plate (384 round well plate, Polystyrol, Thermo Scientific, Langenselbold, Germany). Higher molecular weight aggregates of the protein sample could not be identified. The hydrodynamic radius of the protein was around 5-6 nm, indicating a monomeric protein in solution.

[0252] Secondly, concentration dependent hydrodynamic radius measurements of fusion protein FP278 were performed to estimate the solubility of the protein. Protein concentrations up to 22 mg/ml were applied. Hydrodynamic radii were determined as described above. Upon increasing concentration of the fusion protein FP278, no increase of the radius (5-7 nm) could be observed, whereas dynamic light scattering measurement of wtMFG-E8 (SEQ ID NO: 1) failed due to high aggregation at concentrations of around 0.2 mg/ml.

### Example 6: Optimization of MFG-E8 Fusion Proteins

[0253] Mass spectrometry (MS) was used to investigate the fusion protein FP330 (EGF-HSA-C1-C2) to generate a panel of variant MFG-E8 based fusion proteins optimized for improved expression and yield. A panel of variant proteins was generated with linkers of varying size and structure, for example, linkers comprising GS between the EGF and HSA domains and/or multiples of GS or G4S between the HSA and C1 domains. In addition, amino acid modifications (depicted as HSA* in Table 7) comprising deletions or substitutions were included in some of the variants. The panel of variant fusion proteins is summarized in Table 7 below.

TABLE 7
Summary of variant fusion proteins

| | | Amino acid | | SEQ |
|---|---|---|---|---|
| Variant | Domains | modification¹ | Linker | ID NO: |
| wtMFG- | EGF-C1-C2 | — | — | 1 |
| E8 | | | | |
| FP330 | EGF-GS-HSA- | — | (G₂S)₄ linker | 42 |
| | linker-C1-C2 | | (SEQ ID 62) | |
| FP278 | EGF-GS-HSA- | — | (G₂S)₄ linker | 44 |
| | linker-C1-C2- | | (SEQ ID 62) | |
| | His tag | | | |
| FP811 | EGF-GS-HSA*- | Deletion: | G₄S (SEQ ID | 54 |
| | linker-C1-C2 | G632-L633 | NO: 64) | |
| FP010 | EGF-GS-HSA*- | Deletion: | (G₄S)₂ (SEQ | 56 |
| | linker-C1-C2 | G632-L633 | ID NO: 65) | |
| FP816 | EGF-HSA-C1-C2 | — | — | 58 |
| FP138 | EGF-GS-HSA*- | Deletion: | (G₂S)₄ linker | 52 |
| | linker-C1-C2 | G632-L633 | (SEQ ID 62) | |
| FP284 | EGF-GS-HSA*- | Substitution | (G₂S)₄ linker | 50 |
| | linker-C1-C2 | L633V | (SEQ ID 62) | |
| FP776 | EGF-HSA*-C1-C2 | Deletion: | — | 48 |
| | | A626-L633 | | |
| FP068 | EGF-HSA*-C1-C2 | Deletion: | — | 46 |
| | | G632-L633 | | |

¹ Position of amino acid modification is numbered according to SEQ ID NO: 42 (FP330)

### Example 7: Variant MFG-E8 Fusion Proteins; Expression and Purification

[0254] Methods for generation of fusion proteins in HEK cell lines are described in Example 2. For expression in a proprietary CHO cell line, nucleic acids coding for MFG-E8 variants were synthesized at Geneart (LifeTechnologies) and cloned into a mammalian expression vector using restriction enzyme-ligation based cloning techniques. The resulting plasmids were transfected into CHO-S cells (Thermo). In brief, for transient expression of the fusion proteins, the expression vector was transfected into suspension-adapted CHO-S cells using ExpifectamineCHO transfecting agent (Thermo). Typically, 400 ml of cells in suspension at a density of 6 Mio cells per ml was transfected with DNA containing 400 μg of expression vector encoding the engineered protein. The recombinant expression vector was then introduced into the host cells for further secretion for seven days in culture medium (ExpiCHO expression media, supplemented with ExpiCHO feed and enhancer reagent (Thermo)).

[0255] As can be seen from the expression data shown in Table 8, the variant fusion proteins FP068 (SEQ ID NO: 46) and FP776 (SEQ ID NO: 48) showed an approximate two-fold improvement in expression over the fusion protein FP330 (SEQ ID NO: 42).

TABLE 8
Expression of variant fusion proteins in HEK and
CHO* cell lines

| | Expression post HSA |
|---|---|
| Protein | capture (mg/l) |
| FP330 | 11 |
| FP138 | 10 |
| FP816 | 9 |
| FP068* | 18 |
| FP776* | 21 |
| FP284 | 10 |
| FP811 | 8 |
| FP010 | 10 |

*indicates fusion protein produced in a CHO cell line

[0256] Further therapeutic fusion proteins have been obtained according to the methods described Example 1. For example, expression levels (mg/I) obtained after full purification process (capture and polishing) are 4.3 for Seq ID 80 and 8.4 for Seq ID 82.

### Example 8: Characterization of Variant Fusion Proteins

[0257] The effect of the variant fusion proteins on efferocytosis was determined by performing efferocytosis assays as described in Example 3.

[0258] In a first assay, the effect of the variant fusion proteins in a human macrophage-neutrophil efferocytosis assay was determined according to the method described in Section 3.3 above. M0 macrophages were incubated with the fusion protein FP330 (EGF-HSA-C1-C2; SEQ ID No: 42) or variants FP278 (EGF-HSA-C1-C2-His tag; SEQ ID No: 44) or FP776 (EGF-HSA-C1-C2; SEQ ID No: 48) for 30 min. As shown in FIG. 13, the fusion proteins FP330, FP278 and FP776 can rescue endotoxin (lipopolysaccharide (LPS))-impaired efferocytosis of dying neutrophils by human macrophages. Increasing concentrations of the fusion proteins FP330 (EC₅₀=1.6 nM; FIG. 13A), FP278 (EC₅₀=1.78 nM; FIG. 13B) and FP776 (EC₅₀=0.5 nM; FIG. 13C) led to rescue of impaired efferocytosis caused by the addition of LPS and even promoted efferocytosis once base levels had been reached.

[0259] The fusion proteins FP330, FP278 and FP776 were further characterized in a human endothelial (HUVEC) cell—Jurkat cell efferocytosis assay according to the method described in Section 3.4 above. The effect of the fusion proteins FP330, FP278 and FP776 on the promotion of efferocytosis of dying Jurkat cells by HUVEC endothelial cells is shown in FIG. 14. The internalization of pHrodo-labelled dying human Jurkat T cells by HUVECs was potently promoted by increasing concentrations of FP330 (EC₅₀=3.4 nM; FIG. 14A), FP278 (EC₅₀=2.4 nM; FIG. 14B) and FP776 (EC₅₀=3 nM; FIG. 14C). These results demonstrate that endothelial cells are armed by the fusion proteins to become efficient phagocytes of dying cells.

### Example 9: Protection of Mice from AKI and AKI-Triggered Acute Organ Response

### 9.1 Acute Kidney Injury Model

[0260] Female C57BL/6 mice (18-22 g) were purchased from Charles River (France) and housed in a temperature-controlled facility in filter-top-protected cages with 12-h light/dark cycles. Animals were handled in strict adherence to Swiss federal laws and the NIH Principles of Laboratory Animal Care. The therapeutic fusion protein under test was administered either intraperitonealy (i.p.) or intravenously (i.v.) two hours before surgery. Buprenorphine (Indivior Schweiz AG) was applied sub-cutaneously (s.c.) at a dose of 0.1 mg/kg 60 to 30 minutes before the surgery. The inhalation anesthesia with isoflurane was induced in a narcotic chamber (3.5-5 Vol. %, carrier gas: oxygen) for 5 min before surgery. During surgery, the animal was maintained under anesthesia via a face mask with 1-2 Vol % isoflurane/oxygen, the gas flow rate was 0.8-1.2 l/min. The skin of the abdomen was shaved and disinfected with Betaseptic (Mundipharma, France). Animals were placed on a homeothermic blanket (Rothacher-Switzerland) with a homeothermic monitor system (PhysiTemp, US-Physitemp Instruments LLC, US) and covered by sterile gauze. The body temperature was monitored throughout the surgery by a rectal probe (Physitemp Instruments LLC, US) and controlled to allow a body temperature of 36.5-37.5° C. All animals including SHAM controls underwent unilateral nephrectomy of the right kidney: Following mid-line incision/laparotomy, abdominal content was retracted to the left to expose the right kidney. The right ureter and renal blood vessels were disconnected and ligated, the right kidney was then removed. For animals that underwent AKI, abdominal content was positioned to the right on sterile gauze and the left renal artery and vein were dissected to allow clamping for ischemia induction. A micro-aneurysm clamp (B Braun, Switzerland) was used to clamp the renal pedicle (artery and vein together using one clamp) to block blood flow to the kidney and to induce renal ischemia. Successful ischemia was confirmed by color change of the kidney from red to dark purple, which occurred in a few seconds. Following the ischemia induction (35-38 minutes), the micro-aneurysm clamp was removed. Warm sterile saline (˜2 ml, 37° C.) was used for washing the abdominal contents to rehydrate tissues before closure of the wound. After the wash, an additional 1 ml of sterile saline was added i.p. as fluid replacement. When starting the reperfusion, the wound was closed in two layers (muscle and the skin, separately). The animals were then maintained under red warm lamp until fully recovered. Buprenorphine was administered again 1 h and 4 h after the surgery at a dose of 0.1 mg/kg and was also included into drinking water (9.091 μg/mL). After 24 h animals were euthanized for analysis.

### 9.2 Administration of Therapeutic Fusion Proteins

[0261] The therapeutic fusion proteins FP330 (EGF-HSA-C1-C2; SEQ ID No: 42), FP278 (EGF-HSA-C1-C2-His tag; SEQ ID No: 44) and FP776 (EGF-HSA-C1-C2; SEQ ID No: 48) were tested in the AKI model as described above at the doses set out in Table 9 below. For the studies to detect serum markers and qPCR marker expression, fusion protein FP278 was administered 2 hours before surgery. FP330 and FP776 were dosed i.v. 30 min before ischemia reperfusion injury onset. For the study to measure contrast agent uptake by magnetic resonance imaging, the fusion protein FP776 was dosed prophylactically 30 min before AKI induction at 1.26 mg/kg or dosed therapeutically 5 h post induction of ischemia reperfusion injury at 2 mg/kg i.v.

TABLE 9
Dosing of therapeutic fusion proteins

| Fusion | Dose | Route of |
|---|---|---|
| protein | (mg/kg) | Administration |
| FP278 | 0.16 | i.p. |
| | 0.50 | |
| FP330 | 0.20 | i.v. |
| | 0.50 | |
| | 1.50 | |
| FP776 | 0.20 | i.v. |
| | 0.75 | |
| | 1.26 | |
| | 2.00 | |

### 9.3 Readouts/Analysis for AKI Protection:

### Serum Markers:

[0262] Serum samples were taken 24 h post ischemia reperfusion induction and analyzed for serum creatinine and blood urea nitrogen (BUN) content using a Hitachi M40 clinic analyzer according to manufacturer's instruction (Axonlab, Switzerland).

qPCR Marker Expression in Organs:

[0263] Organs (kidney, liver, lung and heart) were harvested 24 h after AKI induction and were cut in 1 cm pieces and stored in RNA Later buffer (Thermo Fisher Scientific Inc, US) at 4° C. overnight. Organ pieces were transferred to RLT buffer (RNeasy Mini Kit, Qiagen, DE) containing 134 mM Beta-mercaptoethanol (Merck, DE) in Lysing Matrix D tubes (MP Biomedicals FR) and homogenized using the FastPrep-24 Instrument (MP Biomedicals). Heart fibrous tissue was subsequently digested with proteinase K (RNeasy Mini Kit), while kidney, liver and lung lysates were directly centrifuged for 3 min at full speed in a microcentrifuge (Eppendorf, DE). Supernatants were transferred onto a QIAshredder spin column (Qiagen, DE) and centrifuged for 2 min. RNA extraction of the flow-throughs was performed according to the RNeasy Mini Kit Manual, including DNase digestion. RNA concentration was measured with a Nano Drop 1000 device (Thermo Fisher Scientific Inc). 2 μg RNA per sample was reverse transcribed according to the High-Capacity cDNA Reverse Transcription Kit Manual (Thermo Fisher Scientific Inc) using a SimpliAmp Thermocycler (Applied Biosystems, US). cDNA was combined with Nuclease free water (Thermo Fisher Scientific Inc), TaqMan probe (TaqMan Gene Expression Assay (FAM), Thermo Fisher Scientific Inc) and TaqMan Gene Expression Master Mix (Thermo Fisher Scientific Inc) in a 384-well microplate (MicroAmp Optical 384-Well Reaction Plate, Thermo Fisher Scientific Inc). qPCR was performed on the ViiA 7 Real-Time PCR System (Applied Biosystems, US). Settings were 1: 2 min, 50° C.; 2: 10 min, 95° C.; 3: 15 s, 95° C.; 4: 1 min, 60° C. Steps 3 and 4 were repeated for 45 cycles. Data analysis was performed using the ViiA 7 Software, qPCR data analysis software were performed using MS Excel and GraphPad Prism software.

### Contrast Agent Uptake by the Liver as Measured by Magnetic Resonance Imaging (MRI)

[0264] The methods for performing the MRI were adapted from a publication by Egger et al (Egger et al., (2015) J Magn Reson Imaging, 41: 829-840). Experiments were performed on a 7-T Bruker Biospec MRI system (Bruker Biospin, Ettlingen, Germany). During MRI signal acquisitions, mice were placed in a supine position in a Plexiglas cradle. Body temperature was kept at 37±1° C. using a heating pad. Following a short period of induction, anesthesia was maintained with approx. 1.4% isoflurane in a mixture of O₂/N₂O (1:2), administered via a nose cone. All measurements were performed on spontaneously breathing animals; neither cardiac nor respiratory triggering was applied.

[0265] After placing a mouse in the scanner, scout fast images were acquired for localization purposes. Perfusion analyses were performed using an intravascular agent containing superparamagnetic iron oxide (SPIO) nanoparticles (Endorem®, Guerbet, France). Endorem® was injected intravenously as a bolus for 1.2 s into animals with AKI (at 24 h post disease induction) or after Sham operation (animals post 24 h nephrectomy). A first bolus was administered during 1.2 s, in conjunction with the sequential acquisition of echo-planar images at a resolution of 400 ms/image. Following the acquisition of 25 baseline images, a second bolus was injected during 1.2 s and a further 575 images were acquired after the bolus, resulting in a total of 600 images acquired in 4 min. The superparamagnetic contrast agent induced local changes in susceptibility which resulted in a signal attenuation proportional to the perfusion of the kidney. For a series of images, signal intensities were assessed on regions-of-interest (ROIs) located in the cortex/outer stripe of outer medulla. Position, shape, and size of the ROIs were carefully chosen in order to ensure that they covered approximately the same region, despite movements of the kidney caused by respiration. The mean signal intensities for the pre-injection images provided baseline intensities (S(0)). Perfusion indexes were determined from the mean values of the following ratios (Rosen et al., (1990) Magn Reson Med., 14: 249-265):

-In[S(t)/S(0)]˜TE·V·cT(t)

where TE is the echo time, V the blood volume, and cT the concentration of contrast agent.

[0266] The SPIO nanoparticles used in the study have a mean diameter of about 150 nm and are taken up by Kupffer cells in the liver. Therefore, in addition to kidney perfusion, MRI also allowed the uptake of the nanoparticles in the liver to be monitored, by detecting the contrast change assessed in ROIs placed in the liver.

### 9.4 Results

[0267] As shown in FIG. 15, the fusion proteins FP330 (EGF-HSA-C1-C2; SEQ ID No: 42), FP278 (EGF-HSA-C1-C2-His tag; SEQ ID No: 44) and FP776 (EGF-HSA-C1-C2; SEQ ID No: 48) protected kidney function in this model of acute kidney injury (AKI) when administered either i.p. (FP278) or i.v. (FP330 and FP776). This protection is reflected by the block of serum creatinine rise (sCr). FIG. 15A shows that the fusion protein FP278 at both doses tested reduced serum creatinine levels significantly (p<0.0001) compared to vehicle treated animals and as effectively as murine MFG-E8. As shown in FIG. 15B, fusion protein FP330 protected kidney function in a dose dependent manner and likewise for fusion protein FP776 (FIG. 15C), where serum creatinine levels were also blocked in a dose dependent manner.

[0268] Impaired kidney function is also reflected in blood urea nitrogen (BUN) levels in the mice tested and the effect of the fusion protein FP278 on BUN levels is shown in FIG. 16.

[0269] In summary, as shown in FIGS. 15 and 16, the fusion proteins FP278, FP330 and FP776 potently protected against a raise of these markers used to clinically diagnose kidney failure. The observed efficacy was confirmed by histology (not shown).

[0270] Furthermore, as shown in FIG. 17 a single dose of the fusion protein FP278 protects distant organs from acute phase response elicited by AKI. AKI induces a plethora of mRNA responses measurable by qPCR in lysates of distant highly perfused organs such as the spleen, lung liver heart and brain. Typical mRNAs induced selected damage (NGAL, KIM-1), induction of chemokines (not shown) or induction of acute phase response protein induction such as serum amyloid A (SAA). FIGS. 17A and 17B exemplify such AKI-induced response (serum amyloid A (SAA)) in the murine heart and lung which was potently blocked and returned to SHAM levels after a single injection of the fusion protein.

[0271] The uptake of the SPIO contrast agent Endorem® by the liver over time is shown in FIG. 18. Animals with AKI showed significantly reduced uptake of the contrast agent by the liver (target=Kupffer cells) compared to Sham animals. FP776 treatment (dosed prophylactically at 1.26 mg/kg, −30 min before AKI induction, or dosed therapeutically at 2 mg/kg, +5 h post ischemia reperfusion injury induction) protected from the loss of contrast agent accumulation in the liver of AKI mice. These results suggest that in this mouse model, AKI triggers a significant impairment of endogenous Kupffer cell-mediated clearance of particulate and that AKI causes microvascular disturbance which impacts on the accumulation of iron particle contrast agent in the liver. Treatment with fusion protein FP776 protected from loss of clearance and from microvascular disturbance, and even boosted the uptake of the contrast agent at both doses tested, when compared to sham animals.

### Examples 10: Characterization of MFG-E8-HSA Engineered Proteins

### 10.2 αv Integrin Adhesion Assay

[0272] Fusion proteins were diluted in phosphate buffered saline (PBS) pH 7.4 and 50 μL of the indicated concentration was immobilized by adsorption (96 well plate, Nunc Maxisorb) overnight. The plates were subsequently treated with PBS containing 3% fatty acid free bovine serum albumin (BSA) at RT for 1.5 h. αvβ3 integrin-expressing lymphoma cells (ATCC-TIB-48 BW5147.G.1.4, ATCC, US) were cultivated in RPMI 1640 supplemented with GlutaMax, 25 mM HEPES, 10% FBS, Pen/Strep, 1 mM NaPyruvate, 50 μM β-Mercaptoethanol. Cells were labelled with 3 μg/mL 2′,7′-bis-(2carboxyethyl)-5-(and-6)-carboxyfluorescein, acetoxymethyl ester (BCECF AM) (Thermo Fisher Scientific Inc, US) for 30 min. BW5147.G.1.4 cells were resuspended in adhesion buffer (TBS, 0.5% BSA, 1 mM MnCl2, pH 7.4) and 50000 cells/well were allowed to adhere at RT for 40 min. Non-adherent cells were removed by manual washes with adhesion buffer. Fluorescence of adherent cells was quantified using an Envision™ 2103 multilabel plate reader, Perkin Elmer, US. Data analysis was performed using MS Excel and GraphPad Prism software.

[0273] Adhesion of BW5147.G.1.4 cells to immobilized EGF-like domain containing fusion proteins. This finding suggests that under the tested experimental conditions, the RGD loop in EGF-like domain fused to HSA of MFG-E8 or EDIL3/DEL-1 based fusion proteins is accessible and allows interaction with cellular αv integrins.

[0274] Taken together, these data demonstrate that fusion proteins of the present disclosure bind to cellular integrins, support integrin-dependent cell adhesion and indicate that in proteins with a HSA domain insert retain functionality.

### 10.3 Human Macrophage-Neutrophil Efferocytosis Assay

[0275] Human peripheral blood mononuclear cells (PBMCs) were isolated from buffy coat by means of Ficoll gradient centrifugation (Ficoll®-Paque PLUS, GE Healthcare, Sweden) followed by negative selection of monocytes using a Stemcell isolation kit (Stemcell 19059, Vancouver, Canada). Monocytes were differentiated to “M0” macrophages using recombinant human M-CSF 40 ng/mL (Macrophage Colony Stimulating Factor, R&D Systems, US) in RPMI 1640 containing 25 mM HEPES, 10% FBS, Pen/Strep, 1 mM NaPyr, 50 μM β-Merc for 5 days. One day prior to efferocytosis, macrophages were labeled with PKH26 using the Red Fluorescent Dye Linker kit (Sigma MINI26, US). Cells were resuspended in RPMI 1640 containing 25 mM HEPES, 10% FBS, Pen/Strep, 1 mM NaPyr, 50 μM β-Merc and seeded into black 96-well plates (Corning, US) at 40000 cells/well and allowed to adhere for 20 h.

[0276] Neutrophils: Human neutrophils were isolated from buffy coats by dextran sedimentation in combination with a Ficoll™ density gradient as follows: Plasma of the buffy coat was removed by centrifugation of the diluted buffy coat. Cellular harvest was diluted in 1% dextran (from Leuconostoc spp. MW 450.000-650.000; Sigma, US) and allowed to sediment on ice for 2030 min. Leukocytes from supernatant were harvested and on a Ficoll™-Paque layer (GE Healthcare Sweden). After centrifugation the pellet was harvested and remaining erythrocytes were lysed using red blood cell (RBC) lysis buffer (BioConcept, Switzerland). Neutrophils were washed once in medium (RPMI 1640+GlutaMax containing 25 mM HEPES, 10% FBS, Pen/Strep, 0.1 mM NaPyr, 50 uM b-Merc) and kept overnight at 15° C. Apoptosis/cell death was induced by treatment of neutrophils with 1 μg/mL Superfas Ligand (Enzo Life Sciences, Lausanne, Switzerland) at 37° C. for 3 h. Neutrophils were stained with both Hoechst 33342 (Life technologies, US) for 25 min and with DRAQ5 (eBioscience, UK, diluted 1:2000) at 37° C. in the dark for 5 min.

### Efferocytosis Assay

[0277] M0 macrophages were incubated with the fusion proteins for 30 min. Apoptotic labelled neutrophils were added at a ratio of M0/neutrophil 1:4. Efferocytosis of apoptotic neutrophils by macrophages was visualized taking advantage of the fluorescence intensity increase of DRAQ5 upon localization of neutrophils in the pH-low lysosomal compartment of M0 macrophages. Efferocytosis was quantified using an ImageXpress Micro XLS wide field high-content analysis system (Molecular DEVICES. CA, US). Macrophages were identified via PKH26 fluorescence. The efferocytosis index (EI, displayed as %) was calculated as the ratio of macrophages containing at least one ingested apoptotic neutrophil (DRAQ5high) event to the total number of macrophages. Data analysis was performed using MS Excel and GraphPad Prism software. The effect of the fusion protein FP114 and FP133 (MFG-E8 derived EGF-HSA-C1 SEQ ID NO: xxx) on the rescue and promotion of efferocytosis of dying neutrophils by LPS treated human macrophages is shown in FIG. 13D. The fusion proteins increase internalization of pHrodo-labelled dying human neutrophils into macrophages over the already high efferocytosis capacity of M0 macrophages. In FIG. 13E it is shown that recombinant fusion protein FP147 (EDIL/DEL-1 derived EGF_EGF_EGF_HSA_C1) can rescue endotoxin (lipopolysaccharide)-impaired efferocytosis of dying neutrophils by human macrophages. Overall the data show the surprising finding that C2-trunctated MFGE8 or EDIL3/DEL-1 derived fusion proteins promote efferocytosis with low nM efficacy in vitro.

### Example 11: Protection of Mice from AKI

### 11.1 Acute Kidney Injury Model

[0278] Female C57BL/6 mice (18-22 g) were purchased from Charles River (France) and housed in a temperature-controlled facility in filter-top-protected cages with 12-h light/dark cycles. Animals were handled in strict adherence to Swiss federal laws and the NIH Principles of Laboratory Animal Care. The therapeutic fusion protein under test was administered either intraperitonealy (i.p.) or intravenously (i.v.) two hours before surgery. Buprenorphine (Indivior Schweiz AG) was applied sub-cutaneously (s.c.) at a dose of 0.1 mg/kg 60 to 30 minutes before the surgery. The inhalation anesthesia with isoflurane was induced in a narcotic chamber (3.5-5 Vol. %, carrier gas: oxygen) for 5 min before surgery. During surgery, the animal was maintained under anesthesia via a face mask with 1-2 Vol % isoflurane/oxygen, the gas flow rate was 0.8-1.2 l/min. The skin of the abdomen was shaved and disinfected with Betaseptic (Mundipharma, France). Animals were placed on a homeothermic blanket (Rothacher-Switzerland) with a homeothermic monitor system (PhysiTemp, US-Physitemp Instruments LLC, US) and covered by sterile gauze. The body temperature was monitored throughout the surgery by a rectal probe (Physitemp Instruments LLC, US) and controlled to allow a body temperature of 36.5-37.5° C. All animals including SHAM controls underwent unilateral nephrectomy of the right kidney: Following mid-line incision/laparotomy, abdominal content was retracted to the left to expose the right kidney. The right ureter and renal blood vessels were disconnected and ligated, the right kidney was then removed. For animals that underwent AKI, abdominal content was positioned to the right on sterile gauze and the left renal artery and vein were dissected to allow clamping for ischemia induction. A micro-aneurysm clamp (B Braun, Switzerland) was used to clamp the renal pedicle (artery and vein together using one clamp) to block blood flow to the kidney and to induce renal ischemia. Successful ischemia was confirmed by color change of the kidney from red to dark purple, which occurred in a few seconds. Following the ischemia induction (35-38 minutes), the micro-aneurysm clamp was removed. Warm sterile saline (˜2 ml, 37° C.) was used for washing the abdominal contents to rehydrate tissues before closure of the wound. After the wash, an additional 1 ml of sterile saline was added i.p. as fluid replacement. When starting the reperfusion, the wound was closed in two layers (muscle and the skin, separately). The animals were then maintained under red warm lamp until fully recovered. Buprenorphine was administered again 1 h and 4 h after the surgery at a dose of 0.1 mg/kg and was also included into drinking water (9.091 μg/mL). After 24 h animals were euthanized for analysis. The therapeutic fusion proteins FP135 (EGF-HSA-C1; SEQ ID No: x) was tested in the AKI model was dosed at 1.5 mg/kg i.v. 30 min before ischemia reperfusion injury onset. Serum samples were taken 24 h post ischemia reperfusion induction and analyzed for serum creatinine and blood urea nitrogen (BUN) content using a Hitachi M40 clinic analyzer according to manufacturer's instruction (Axonlab, Switzerland).

### Examples 12: EGF_HSA_C1 Protects in Liver Fibrosis Model (CCL4 Model)

[0279] Liver fibrosis is a wound healing response to various types of insults. If it progresses, it can lead to liver cirrhosis and later, to hepatocellular carcinoma (HCC). Common causes of liver fibrosis in industrialized countries are alcohol abuse, viral hepatitis infections, and metabolic syndromes due to obesity, insulin resistance and diabetes.

[0280] Prolonged insult results in inflammation and the deposition of extracellular matrix (ECM) proteins by myofibroblast-like cells which are basically activated hepatic stellate cells (HSC). These cells produce alpha smooth muscle actin (aSMA) and deposit collagens type I and III, as well as producing matrix metalloproteinases (MMPs) and tissue inhibitors (TIMPs). As the disease becomes chronic, the composition of the ECM changes from collagens type IV and VI, glycoproteins and proteoglycans into collagens type I and III and fibronectin.

[0281] The liver is able to regenerate if the injury is not severe, whereby neighboring adult hepatocytes are capable of replacing apoptotic or necrotic cells. Resolution of fibrosis occurs when the activated HSC undergo apoptosis or revert into a more quiescent phenotype.

[0282] There are several in vivo models available that attempt to mimic various aspects of the disease. The liver fibrosis model needs to be able to mirror various pathological and molecular features of the human disease, as well as being easy to set up and with good reproducibility. Chemical-induced fibrosis models are the closest to these ideal characteristics with one such being the carbon tetrachloride (CCl₄) liver fibrosis model in rodents. Upon repeated intraperitoneal injection of this hepatoxin, a liver fibrosis develops that demonstrates a good likeness to human liver fibrosis. Further, withdrawal of the insult results in resolution of fibrosis and thus the model is reversible.

[0283] In the first phase, the CYP2E1 enzyme metabolizes CCl₄ to give the trichloromethyl free radical that contributes to an acute phase reaction characterized by damage of lipid membranes and internal organelles of hepatocytes ultimately leading to necrosis. Acute CCl4-mediated liver fibrosis is then characterized by activation of Kupffer cells and induction of an inflammatory response, resulting in secretion of cytokines, chemokines and other proinflammatory factors. This in turn attracts and activates monocytes, neutrophils and lymphocytes, which further contributes to liver necrosis followed by a strong regenerative response resulting in substantial proliferation of hepatocytes and nonparenchymal liver cells around 48 hours after the first CCl₄ application. Histological fibrosis and scarring fibers appear 2 to 3 weeks later in a second phase of disease. A third phase with extensive fibrosis and massive hepatic fat accumulation and increased serum levels of triglycerides and AST can be observed after 4 to 6 weeks of CCl₄ injury. Complete resolution of CCl₄-induced liver fibrosis in mice is observed normally within several weeks after withdrawal of the CCl₄ toxin. An drug with the property to accelerate resolution of fibrosis would be of particular relevance for patients with established diseases. E.g. patients with NASH (non-alcoholic steatohepatitis) chronic kidney disease or scleroderma who have established fibrosis the demonstration of resolution of fibrosis could become a major primary clinical endpoint and may enable not only to stop disease but also to restore organ function. (Yanguas et al 2016. Experimental models of liver fibrosis. Arch Toxicol. 2016; 90: 1025-1048. doi: 10.1007/s00204-015-1543-4)

### CCL4 Liver Fibrosis Model:

### Disease Induction:

[0284] CCl₄ was injected intraperitoneally 3 times per week during 6 weeks in 8-12 week old male BALB/c mice at a dose of 500μl/kg freshly diluted in olive oil. Netherlands). CCl₄ was given for a total of 6 weeks to induce liver fibrosis. Treatment with EGF_HSA_C1 (FP135) was initiated either after 4 weeks or 5 weeks or 6 weeks of CCL4 treatment. EGF_HSA_C1 (FP135) was applied at 0.8 mg/kg 3 times weekly intraperitoneally until termination of the experiment (3 days after cessation of CCL4).

### Readouts:

[0285] Liver enzymes such as ALT (alanine transaminase) and AST (aspartate transaminase) were measured as an assessment of liver damage in serum samples obtained at stop of CCL4 (day 0) and after 3 days at termination of the experiment. ALT and AST were analyzed using a Hitachi M40 clinic analyzer according to manufacturer's instruction (Axonlab, Switzerland). To quantify the content of collagen in the livers of animals, a hydroxyproline assay was performed according to manufacturer's instructions using the Total collagen assay (QuickZyme Biosciences, The Netherlands). The expression of collagen genes COL1A1 and COL1A2 by qPCR was performed as described in section 9.3.

[0286] Sonoelastography was used as a reliable and reproducible non-invasive method to assess liver elasticity (stiffness) and has been shown to positively correlate with the liver fibrosis (Li, R., Ren, X., Yan, F. et al. Liver fibrosis detection and staging: a comparative study of T1ρ MR imaging and 2D real-time shear-wave elastography. Abdom Radiol 43, 1713-1722 (2018). https://doi.org/10.1007/s00261-017-1381-3). Further, this technique is used in the clinic and can help to better translate the outcome of preclinical data to the human liver disease with fibrosis. Liver stiffness was been determined usingultrasound-based shear wave elastography (SWE) assessment: SWE was performed with an Aixplorer® device (Supersonic Imagine, Aix-en-Provence, France). For the acquisitions, mice were anesthetized with isoflurane (˜1.5%) and positioned on a heating pad. The ultrasound probe (model SL25-15, SuperSonic Imagine, bandwidth 25 MHz, number of elements 256) was attached to a support and approached to the liver for the assessments. The probe allowed sufficient penetration of the waves for both B-mode and SWE acquisitions.

[0287] To minimize movement artefacts due to breathing, elastograms were acquired at expiration. Three elastograms were acquired per mouse and time point. The mean stiffness was then extracted from the three elastograms. The ultrasound examination lasted for approximately 5 min.

### Example 13 Generation of C2-Truncated MFG-E8 (EGF-C1) and HSA Fusion (EGF-HSA-C1); Expression and Purification

[0288] Methods for generation of the proteins disclosed herein are described below.

[0289] DNA was synthesized at GeneArt (Regensburg, Germany) and cloned into a mammalian expression vector using restriction enzyme-ligation based cloning techniques. The resulting plasmid was transfected into HEK293T cells for transient expression of proteins. In brief, vectors were transfected into suspension-adapted HEK293T cells using Polyethylenimine (PEI; Cat #24765 Polysciences, Inc.). Typically, 100 ml of cells in suspension at a density of 1-2 Mio cells per ml were transfected with DNA containing 100 μg of expression vector encoding the protein of interest. The recombinant expression vectors were then introduced into the host cells and the construct produced by further culturing of the cells for a period of 7 days to allow for secretion into the culture medium (HEK, serum-fee medium) supplemented with 0.1% pluronic acid, 4 mM glutamine, and 0.25 μg/ml antibiotic.

[0290] The produced constructs were then purified from cell-free supernatant, using immobilized metal ion affinity chromatography (IMAC) or anti-HSA capture chromatography.

[0291] When his-tagged protein was captured by IMAC, filtered conditioned media was mixed with IMAC resin (GE Healthcare), equilibrated with 20 mM NaPO4, 0.5 Mn NaCl, 20 mM Imidazole, pH7.0. The resin was washed three times with 15 column volumes of 20 mM NaPO4, 0.5 Mn NaCl, 20 mM Imidazole, pH7.0 before the protein was eluted with 10 column volumes elution buffer (20 mM NaPO4, 0.5 Mn NaCl, 500 mM Imidazole, pH7.0).

[0292] When protein was captured by anti-HSA chromatography, filtered conditioned media was mixed with anti-HSA resin (Capture Select Human Albumin affinity matrix, Thermo), equilibrated with PBS, pH7.4. The resin was washed three times with 15 column volumes of PBS, pH7.4 before the protein was eluted with 10 column volumes elution buffer (50 mM citrate, 90 mM NaCl, pH 2.5) and pH neutralized using 1M TRIS pH10.0.

[0293] Finally, eluted fractions were polished by using size exclusion chromatography (HiPrep Superdex 200, 16/60, GE Healthcare Life Sciences).

[0294] Aggregation content was followed over the purification process by analytical size exclusion chromatography (Superdex 200 Increase 3.2/300 GL, GE Healthcare Life Sciences).

[0295] Aggregation level after capture step and expression yield after purification of C2 truncated MFG-E8 and HSA fusion are shown in Table 10. HSA fusion of C2-truncated MFG-E8 shows at least 40-fold improvement in expression over C2-truncated MFG-E8. Moreover, HSA fusion of C2-truncated MFG-E8 shows at least 4-times less aggregation compare to C2-truncated MFG-E8. These data suggest HSA fusion of 02-truncated MFG-E8 exhibits better production properties compare to C2-truncated MFG-E8. By consequence, HSA fusion seems to have better developability for usage as drug.

TABLE 10
Aggregation level after capture step and expression yield after
purification of EGF-C1and EGF-HSA-C1 proteins

| | | Aggregation | Expression yield after |
|---|---|---|---|
| | | after capture | capture and polishing |
| | SEQ ID | step (%) | (mg/L) |
| EGF_C1 | 115 | 46.7 | 0.275 |
| EGF_HSA_C1 | 73 | 10.8 | 11.575 |

### Example 14: Dynamic Light Scattering (DLS) of C2-Truncated MFG-E8 (EGF-C1) and HSA Fusion (EGF-HSA-C1)

[0296] The aggregation propensity of 02-truncated MFG-E8 and HSA fusion was measured by dynamic light scattering (DLS, Wyatt). Dynamic light scattering was applied to measure the translational diffusion coefficients of protein in solution by quantifying dynamic fluctuations in scattered light. As an indicator of aggregation formation, hydrodynamic radius was measured upon thermal stress at a concentration of 3 mg/ml, using a DynaPro™ plate reader (Wyatt Technology Europe GmbH, Dernbach, Germany) combined with the software DYNAMICS (version 7.1.0.25, Wyatt). Protein solution was measured in a 384-well plate (384 round well plate, Polystyrol, Thermo Scientific, Langenselbold, Germany).

[0297] As showed FIG. 23, C2 truncated MFG-E8 shows an overall higher hydrodynamic radius compare to HSA fusion (5 nm vs 80 nm at 25° C.). Moreover, C2-truncated MFG-E8 shows strong increase of hydrodynamic radius starting at 45° C., indicating a strong aggregation formation, whereas HSA fusion retains the same hydrodynamic radius until at least 55° C. These data suggest HSA fusion of C2-truncated MFG-E8 is more stable and exhibits better biophysical properties compare to C2-truncated MFG-E8. By consequence, HSA fusion seems to have better developability for usage as drug.

[0298] Taken together, these data demonstrate that fusion proteins of the present disclosure, e.g. with a HSA domain insert, are functional and efficacious and therefore are suitable to be used as therapeutics.

[0299] It is understood that the examples and embodiments described herein are for illustrative purposes only and that various modifications or changes in light thereof will be suggested to persons skilled in the art and are to be included within the spirit and purview of this application and scope of the appended claims. All publications, patents, and patent applications cited herein are hereby incorporated by reference for all purposes.

The application's sequence listing, which the Patent Office published only in electronic form, follows.

SEQUENCE LISTING (148 sequences)

SEQ ID NO: 1 - protein, 387 aa, Homo sapiens
MPRPRLLAALCGALLCAPSLLVALDICSKNPCHNGGLCEEISQEVRGDVFPSYTCTCLKGYAGNHCETKCVEPLGLENGNIANSQIAASSVRVTFLGLQHWVPELARLNRAGMVNAWTPSSNDDNPWIQVNLLRRMWVTGVVTQGASRLASHEYLKAFKVAYSLNGHEFDFIHDVNKKHKEFVGNWNKNAVHVNLFETPVEAQYVRLYPTSCHTACTLRFELLGCELNGCANPLGLKNNSIPDKQITASSSYKTWGLHLFSWNPSYARLDKQGNFNAWVAGSYGNDQWLQVDLGSSKEVTGIITQGARNFGSVQFVASYKVAYSNDSANWTEYQDPRTGSSKIFPGNWDNHSHKKNLFETPILARYVRILPVAWHNRIALRLELLGC

SEQ ID NO: 2 - protein, 46 aa, Homo sapiens
LDICSKNPCHNGGLCEEISQEVRGDVFPSYTCTCLKGYAGNHCETK

SEQ ID NO: 3 - protein, 318 aa, Homo sapiens
CVEPLGLENGNIANSQIAASSVRVTFLGLQHWVPELARLNRAGMVNAWTPSSNDDNPWIQVNLLRRMWVTGVVTQGASRLASHEYLKAFKVAYSLNGHEFDFIHDVNKKHKEFVGNWNKNAVHVNLFETPVEAQYVRLYPTSCHTACTLRFELLGCELNGCANPLGLKNNSIPDKQITASSSYKTWGLHLFSWNPSYARLDKQGNFNAWVAGSYGNDQWLQVDLGSSKEVTGIITQGARNFGSVQFVASYKVAYSNDSANWTEYQDPRTGSSKIFPGNWDNHSHKKNLFETPILARYVRILPVAWHNRIALRLELLGC

SEQ ID NO: 4 - protein, 583 aa, Homo sapiens
DAHKSEVAHRFKDLGEENFKALVLIAFAQYLQQCPFEDHVKLVNEVTEFAKTCVADESAENCDKSLHTLFGDKLCTVATLRETYGEMADCCAKQEPERNECFLQHKDDNPNLPRLVRPEVDVMCTAFHDNEETFLKKYLYEIARRHPYFYAPELLFFAKRYKAAFTECCQAADKAACLLPKLDELRDEGKASSAKQRLKCASLQKFGERAFKAWAVARLSQRFPKAEFAEVSKLVTDLTKVHTECCHGDLLECADDRADLAKYICENQDSISSKLKECCEKPLLEKSHCIAEVENDEMPADLPSLAADFVESKDVCKNYAEAKDVFLGMFLYEYARRHPDYSVVLLLRLAKTYETTLEKCCAAADPHECYAKVFDEFKPLVEEPQNLIKQNCELFEQLGEYKFQNALLVRYTKKVPQVSTPTLVEVSRNLGKVGSKCCKHPEAKRMPCAEDYLSVVLNQLCVLHEKTPVSDRVTKCCTESLVNRRPCFSALEVDETYVPKEFNAETFTFHADICTLSEKERQIKKQTALVELVKHKPKATKEQLKAVMDDFAAFVEKCCKADDKETCFAEEGKKLVAASQAAL

SEQ ID NO: 5 - protein, 583 aa, Artificial Sequence
  source: /note="Description of Artificial Sequence: Synthetic polypeptide"
DAHKSEVAHRFKDLGEENFKALVLIAFAQYLQQSPFEDHVKLVNEVTEFAKTCVADESAENCDKSLHTLFGDKLCTVATLRETYGEMADCCAKQEPERNECFLQHKDDNPNLPRLVRPEVDVMCTAFHDNEETFLKKYLYEIARRHPYFYAPELLFFAKRYKAAFTECCQAADKAACLLPKLDELRDEGKASSAKQRLKCASLQKFGERAFKAWAVARLSQRFPKAEFAEVSKLVTDLTKVHTECCHGDLLECADDRADLAKYICENQDSISSKLKECCEKPLLEKSHCIAEVENDEMPADLPSLAADFVESKDVCKNYAEAKDVFLGMFLYEYARRHPDYSVVLLLRLAKTYETTLEKCCAAADPHECYAKVFDEFKPLVEEPQNLIKQNCELFEQLGEYKFQNALLVRYTKKVPQVSTPTLVEVSRNLGKVGSKCCKHPEAKRMPCAEDYLSVVLNQLCVLHEKTPVSDRVTKCCTESLVNRRPCFSALEVDETYVPKEFNAETFTFHADICTLSEKERQIKKQTALVELVKHKPKATKEQLKAVMDDFAAFVEKCCKADDKETCFAEEGKKLVAASQAAL

SEQ ID NO: 6 - protein, 206 aa, Artificial Sequence
  source: /note="Description of Artificial Sequence: Synthetic polypeptide"
LVEEPQNLIKQNCELFEQLGEYKFQNALLVRYTKKVPQVSTPTLVEVSRNLGKVGSKCCKHPEAKRMPCAEDCLSVFLNQLCVLHEKTPVSDRVTKCCTESLVNGRPCFSALEVDETYVPKEFNAETFTFHADICTLSEKERQIKKQTALVELVKHKPKATKEQLKAVMDDFAAFVEKCCKADDKETCFAEEGKKLVAASQAALGL

SEQ ID NO: 7 - protein, 217 aa, Homo sapiens
APELLGGPSVFLFPPKPKDTLMISRTPEVTCVVVDVSHEDPEVKFNWYVDGVEVHNAKTKPREEQYNSTYRVVSVLTVLHQDWLNGKEYKCKVSNKALPAPIEKTISKAKGQPREPQVYTLPPSREEMTKNQVSLTCLVKGFYPSDIAVEWESNGQPENNYKTTPPVLDSDGSFFLYSKLTVDKSRWQQGNVFSCSVMHEALHNHYTQKSLSLSPGK

SEQ ID NO: 8 - protein, 217 aa, Artificial Sequence
  source: /note="Description of Artificial Sequence: Synthetic polypeptide"
APELLGGPSVFLFPPKPKDTLMISRTPEVTCVVVAVSHEDPEVKFNWYVDGVEVHNAKTKPREEQYNSTYRVVSVLTVLHQDWLNGKEYKCKVSNKALAAPIEKTISKAKGQPREPQVYTLPPSREEMTKNQVSLTCLVKGFYPSDIAVEWESNGQPENNYKTTPPVLDSDGSFFLYSKLTVDKSRWQQGNVFSCSVMHEALHNHYTQKSLSLSPGK

SEQ ID NO: 9 - protein, 217 aa, Artificial Sequence
  source: /note="Description of Artificial Sequence: Synthetic polypeptide"
APELLGGPSVFLFPPKPKDTLMISRTPEVTCVVVAVSHEDPEVKFNWYVDGVEVHNAKTKPREEQYNSTYRVVSVLTVLHQDWLNGKEYKCKVSNKALAAPIEKTISKAKGQPREPQVYTLPPCREEMTKNQVSLWCLVKGFYPSDIAVEWESNGQPENNYKTTPPVLDSDGSFFLYSKLTVDKSRWQQGNVFSCSVMHEALHNHYTQKSLSLSPGK

SEQ ID NO: 10 - protein, 217 aa, Artificial Sequence
  source: /note="Description of Artificial Sequence: Synthetic polypeptide"
APELLGGPSVFLFPPKPKDTLMISRTPEVTCVVVAVSHEDPEVKFNWYVDGVEVHNAKTKPREEQYNSTYRVVSVLTVLHQDWLNGKEYKCKVSNKALAAPIEKTISKAKGQPREPQVCTLPPSREEMTKNQVSLSCAVKGFYPSDIAVEWESNGQPENNYKTTPPVLDSDGSFFLVSKLTVDKSRWQQGNVFSCSVMHEALHNHYTQKSLSLSPGK

SEQ ID NO: 11 - protein, 457 aa, Homo sapiens
DICDPNPCENGGICLPGLADGSFSCECPDGFTDPNCSSVVEVASDEEEPTSAGPCTPNPCHNGGTCEISEAYRGDTFIGYVCKCPRGFNGIHCQHNINECEVEPCKNGGICTDLVANYSCECPGEFMGRNCQYKCSGPLGIEGGIISNQQITASSTHRALFGLQKWYPYYARLNKKGLINAWTAAENDRWPWIQINLQRKMRVTGVITQGAKRIGSPEYIKSYKIAYSNDGKTWAMYKVKGTNEDMVFRGNIDNNTPYANSFTPPIKAQYVRLYPQVCRRHCTLRMELLGCELSGCSEPLGMKSGHIQDYQITASSIFRTLNMDMFTWEPRKARLDKQGKVNAWTSGHNDQSQWLQVDLLVPTKVTGIITQGAKDFGHVQFVGSYKLAYSNDGEHWTVYQDEKQRKDKVFQGNFDNDTHRKNVIDPPIYARHIRILPWSWYGRITLRSELLGCTEEE

SEQ ID NO: 12 - protein, 1052 aa, Artificial Sequence
  source: /note="Description of Artificial Sequence: Synthetic polypeptide"
DICDPNPCENGGICLPGLADGSFSCECPDGFTDPNCSSVVEVASDEEEPTSAGPCTPNPCHNGGTCEISEAYRGDTFIGYVCKCPRGFNGIHCQHNINECEVEPCKNGGICTDLVANYSCECPGEFMGRNCQYKGSDAHKSEVAHRFKDLGEENFKALVLIAFAQYLQQSPFEDHVKLVNEVTEFAKTCVADESAENCDKSLHTLFGDKLCTVATLRETYGEMADCCAKQEPERNECFLQHKDDNPNLPRLVRPEVDVMCTAFHDNEETFLKKYLYEIARRHPYFYAPELLFFAKRYKAAFTECCQAADKAACLLPKLDELRDEGKASSAKQRLKCASLQKFGERAFKAWAVARLSQRFPKAEFAEVSKLVTDLTKVHTECCHGDLLECADDRADLAKYICENQDSISSKLKECCEKPLLEKSHCIAEVENDEMPADLPSLAADFVESKDVCKNYAEAKDVFLGMFLYEYARRHPDYSVVLLLRLAKTYETTLEKCCAAADPHECYAKVFDEFKPLVEEPQNLIKQNCELFEQLGEYKFQNALLVRYTKKVPQVSTPTLVEVSRNLGKVGSKCCKHPEAKRMPCAEDYLSVVLNQLCVLHEKTPVSDRVTKCCTESLVNRRPCFSALEVDETYVPKEFNAETFTFHADICTLSEKERQIKKQTALVELVKHKPKATKEQLKAVMDDFAAFVEKCCKADDKETCFAEEGKKLVAASQAALGLGGSGGSGGSGGSCSGPLGIEGGIISNQQITASSTHRALFGLQKWYPYYARLNKKGLINAWTAAENDRWPWIQINLQRKMRVTGVITQGAKRIGSPEYIKSYKIAYSNDGKTWAMYKVKGTNEDMVFRGNIDNNTPYANSFTPPIKAQYVRLYPQVCRRHCTLRMELLGCELSGCSEPLGMKSGHIQDYQITASSIFRTLNMDMFTWEPRKARLDKQGKVNAWTSGHNDQSQWLQVDLLVPTKVTGIITQGAKDFGHVQFVGSYKLAYSNDGEHWTVYQDEKQRKDKVFQGNFDNDTHRKNVIDPPIYARHIRILPWSWYGRITLRSELLGC

SEQ ID NO: 13 - DNA, 3156 bp, Artificial Sequence
  source: /note="Description of Artificial Sequence: Synthetic polynucleotide"
gacatctgcgaccccaatccttgcgagaatggcggcatttgtctgcctggactggccgatggcagcttctcttgtgaatgccccgatggcttcacagaccccaattgcagctctgtggtggaagtggccagcgacgaggaagaacctacaagcgctggcccctgcacacccaatccatgtcataatggcggaacctgcgagatcagcgaggcctacagaggcgataccttcatcggctacgtgtgcaagtgccccagaggcttcaatggcatccactgccagcacaacatcaacgagtgcgaggtggaaccatgcaagaacggcggcatctgtaccgacctggtggccaattactcttgcgagtgccctggcgagttcatgggcagaaactgccagtacaagggatccgacgctcacaagtctgaggtggcccacagattcaaggacctgggcgaagagaacttcaaggccctggtgctgatcgccttcgctcagtatctgcagcagagccctttcgaggaccacgtgaagctggtcaacgaagtgaccgagttcgccaagacctgtgtggccgatgagagcgccgagaactgtgacaagagcctgcacacactgttcggcgacaagctgtgtaccgtggccacactgagagaaacctacggcgagatggccgactgctgtgccaagcaagagcccgagagaaacgagtgcttcctgcagcacaaggacgacaaccccaacctgcctagactcgtgcgacccgaagtggatgtgatgtgcaccgcctttcacgacaacgaggaaaccttcctgaagaagtacctgtacgagatcgccagacggcacccctacttttatgcccctgagctgctgttcttcgccaagcggtataaggccgccttcaccgaatgttgccaggccgctgataaggctgcctgtctgctgcctaagctggacgagctgagagatgagggcaaagccagctctgccaagcagagactgaagtgcgccagcctgcagaagttcggcgagagagcttttaaggcctgggccgttgccagactgagccagagatttcctaaggccgagtttgccgaggtgtccaagctcgtgaccgatctgacaaaggtgcacaccgagtgctgtcacggcgatctgctggaatgtgccgacgatagagccgacctggccaagtatatctgcgagaaccaggacagcatcagcagcaagctgaaagagtgctgcgagaagcccctgctggaaaagtctcactgtatcgccgaggtcgagaacgacgagatgcctgctgatctgcctagcctggccgccgatttcgtggaaagcaaggatgtgtgcaagaactacgccgaggccaaagatgtgtttctgggcatgtttctgtatgagtacgcccgcagacaccccgactattctgtggttctgctgctgcggctggccaagacatacgagacaaccctggaaaaatgctgcgccgctgccgatcctcacgagtgttatgccaaggtgttcgacgagttcaagccactggtggaagaaccccagaacctgatcaagcagaactgcgagctgttcgagcagctgggcgagtacaagttccagaatgccctgctcgtgcggtacaccaagaaagtgcctcaggtgtccacacctacactggttgaggtgtcccggaatctgggcaaagtgggcagcaagtgttgcaagcaccctgaggccaagagaatgccttgcgccgaggattacctgagcgtggtgctgaatcagctgtgcgtgctgcacgagaaaacccctgtgtccgacagagtgaccaagtgctgtaccgagagcctcgtgaacagaaggccttgctttagcgccctggaagtggacgagacatacgtgcccaaagagttcaacgccgagacattcaccttccacgccgatatctgcaccctgtccgagaaagagcggcagatcaagaagcagacagccctggtcgagctggttaagcacaagcccaaggccaccaaagaacagctgaaggccgtgatggacgacttcgccgcctttgtcgagaagtgctgcaaggccgacgacaaagagacatgcttcgccgaagagggcaagaaactggtggctgcctctcaggctgctctcggacttggaggaagcggaggatctggcggttccggaggaagttgttctggccctcttggcatcgaaggcggcatcatcagcaatcagcagatcaccgccagcagcacccacagagcactgtttggactgcagaaatggtatccctactacgcccggctgaacaagaagggcctgattaacgcctggacagccgccgagaatgacagatggccctggattcagatcaacctgcagcggaagatgagagtgaccggcgttatcacacagggcgccaaaagaatcggcagccccgagtacatcaagagctacaagatcgcctacagcaacgacggcaagacctgggccatgtacaaagtgaagggcaccaacgaggacatggtgttccggggcaacatcgacaacaacaccccttacgccaacagcttcacccctcctatcaaggcccagtacgtgcggctgtaccctcaagtgtgcagaaggcactgtaccctgagaatggaactgctgggctgcgaactgtctggctgttctgagccactgggcatgaagtccggccacatccaggattaccagatcacagcctccagcatcttcagaaccctgaacatggatatgttcacctgggagccccggaaggccagactggataagcagggaaaagtgaatgcctggaccagcggccacaacgaccagtctcaatggctgcaagtggacctgctggtgcccaccaaagtgaccggaatcattactcagggcgcaaaggacttcggccacgtgcagtttgtgggctcctacaagctggcctactccaacgatggcgagcactggacagtgtaccaggacgagaagcagcgcaaggataaggtgttccagggaaacttcgataacgatacccaccggaagaacgtgatcgaccctccaatctacgccagacacatcagaatcctgccttggtcttggtacggcagaatcaccctgagatccgagctgctgggatgc

SEQ ID NO: 14 - protein, 596 aa, Artificial Sequence
  source: /note="Description of Artificial Sequence: Synthetic polypeptide"
LDICSKNPCHNGGLCEEISQEVRGDVFPSYTCTCLKGYAGNHCETKCVEPLGMENGNIANSQIAASSVRVTFLGLQHWVPELARLNRAGMVNAWTPSSNDDNPWIQVNLLRRMWVTGVVTQGASRLASHEYLKAFKVAYSLNGHEFDFIHDVNKKHKEFVGNWNKNAVHVNLFETPVEAQYVRLYPTSCHTACTLRFELLGCELNGCANPLGLKNNSIPDKQITASSSYKTWGLHLFSWNPSYARLDKQGNFNAWVAGSYGNDQWLQVDLGSSKEVTGIITQGARNFGSVQFVASYKVAYSNDSANWTEYQDPRTGSSKIFPGNWDNHSHKKNLFETPILARYVRILPVAWHNRIALRLELLGCGGGGTDKTHTCPPCPAPELLGGPSVFLFPPKPKDTLMISRTPEVTCVVVDVSHEDPEVKFNWYVDGVEVHNAKTKPREEQYNSTYRVVSVLTVLHQDWLNGKEYKCKVSNKALPAPIEKTISKAKGQPREPQVYTLPPCREEMTKNQVSLWCLVKGFYPSDIAVEWESNGQPENNYKTTPPVLDSDGSFFLYSKLTVDKSRWQQGNVFSCSVMHEALHNHYTQKSLSLSPGK

SEQ ID NO: 15 - DNA, 1788 bp, Artificial Sequence
  source: /note="Description of Artificial Sequence: Synthetic polynucleotide"
ctggacatctgcagcaagaacccctgccacaacggcggcctgtgcgaagagatcagccaggaagtgcggggcgacgtgttccccagctacacctgtacctgcctgaagggctacgccggcaaccactgcgagactaagtgcgtggaacccctgggcatggaaaacggcaatattgccaacagccagatcgccgccagctccgtgcgcgtgacctttctgggactgcagcactgggtgcccgagctggccagactgaacagagccggcatggtgaacgcctggacccccagcagcaacgacgacaacccttggatccaggtgaacctgctgcggcggatgtgggtgacaggcgtggtgacacagggcgccagcagactggccagccacgagtacctgaaggcctttaaggtggcctacagcctgaacggccacgagttcgacttcatccacgacgtgaacaagaaacacaaagaatttgtgggcaactggaacaagaacgccgtgcacgtgaacctgttcgagacacccgtggaagcccagtacgtgcggctgtaccccaccagctgccacaccgcctgcaccctgagattcgagctgctgggctgcgagctgaacggctgcgccaaccccctgggcctgaagaacaacagcatccccgacaagcagatcaccgcctccagcagctacaagacctggggcctgcacctgttcagctggaaccccagctacgcccggctggacaagcagggcaacttcaacgcctgggtggccggcagctacggcaacgaccagtggctgcaggtggacctgggcagcagcaaagaagtgaccggcatcatcacccagggggccagaaacttcggcagcgtgcagttcgtggccagctacaaagtggcctactccaacgacagcgccaactggaccgagtaccaggacccccggaccggcagctccaagatcttccccggcaactgggacaaccacagccacaagaagaatctgttcgaaacccccatcctggccagatacgtgcggatcctgcccgtggcctggcacaaccggatcgccctgagactggaactgctgggatgtgggggaggcggtaccgacaagacccacacctgccccccctgcccagccccagagctgctgggcggaccctccgtgttcctgttcccccccaagcccaaggacaccctgatgatcagcaggacccccgaggtgacctgcgtggtggtggacgtgagccacgaggacccagaggtgaagttcaactggtacgtggacggcgtggaggtgcacaacgccaagaccaagcccagagaggagcagtacaacagcacctacagggtggtgtccgtgctgaccgtgctgcaccaggactggctgaacggcaaggaatacaagtgcaaggtctccaacaaggccctgccagcccccatcgaaaagaccatcagcaaggccaagggccagccacgggagccccaggtgtacaccctgcccccctgccgggaggagatgaccaagaaccaggtgtccctgtggtgtctggtgaagggcttctaccccagcgacatcgccgtggagtgggagagcaacggccagcccgagaacaactacaagaccacccccccagtgctggacagcgacggcagcttcttcctgtacagcaagctgaccgtggacaagtccaggtggcagcagggcaacgtgttcagctgcagcgtgatgcacgaggccctgcacaaccactacacccagaagagcctgagcctgtcccccggcaag

SEQ ID NO: 16 - protein, 613 aa, Artificial Sequence
  source: /note="Description of Artificial Sequence: Synthetic polypeptide"
LDICSKNPCHNGGLCEEISQEVRGDVFPSYTCTCLKGYAGNHCETKGSDKTHTCPPCPAPELLGGPSVFLFPPKPKDTLMISRTPEVTCVVVDVSHEDPEVKFNWYVDGVEVHNAKTKPREEQYNSTYRVVSVLTVLHQDWLNGKEYKCKVSNKALPAPIEKTISKAKGQPREPQVYTLPPSREEMTKNQVSLTCLVKGFYPSDIAVEWESNGQPENNYKTTPPVLDSDGSFFLYSKLTVDKSRWQQGNVFSCSVMHEALHNHYTQKSLSLSPGKGGSGGSGGSGGSCVEPLGMENGNIANSQIAASSVRVTFLGLQHWVPELARLNRAGMVNAWTPSSNDDNPWIQVNLLRRMWVTGVVTQGASRLASHEYLKAFKVAYSLNGHEFDFIHDVNKKHKEFVGNWNKNAVHVNLFETPVEAQYVRLYPTSCHTACTLRFELLGCELNGCANPLGLKNNSIPDKQITASSSYKTWGLHLFSWNPSYARLDKQGNFNAWVAGSYGNDQWLQVDLGSSKEVTGIITQGARNFGSVQFVASYKVAYSNDSANWTEYQDPRTGSSKIFPGNWDNHSHKKNLFETPILARYVRILPVAWHNRIALRLELLGCGSHHHHHH

SEQ ID NO: 17 - DNA, 1839 bp, Artificial Sequence
  source: /note="Description of Artificial Sequence: Synthetic polynucleotide"
ctggacatctgcagcaagaatccttgccacaacggcggcctgtgcgaagagatttctcaagaagtgcggggcgacgttttccccagctacacctgtacatgtctgaagggctacgccggcaaccactgcgagacaaaaggatccgacaagacccacacctgccccccctgcccagccccagagctgctgggcggaccctccgtgttcctgttcccccccaagcccaaggacaccctgatgatcagcaggacccccgaggtgacctgcgtggtggtggacgtgagccacgaggacccagaggtgaagttcaactggtacgtggacggcgtggaggtgcacaacgccaagaccaagcccagagaggagcagtacaacagcacctacagggtggtgtccgtgctgaccgtgctgcaccaggactggctgaacggcaaggaatacaagtgcaaggtctccaacaaggccctgccagcccccatcgaaaagaccatcagcaaggccaagggccagccacgggagccccaggtgtacaccctgcccccctcccgggaggagatgaccaagaaccaggtgtccctgacctgtctggtgaagggcttctaccccagcgacatcgccgtggagtgggagagcaacggccagcccgagaacaactacaagaccacccccccagtgctggacagcgacggcagcttcttcctgtacagcaagctgaccgtggacaagtccaggtggcagcagggcaacgtgttcagctgcagcgtgatgcacgaggccctgcacaaccactacacccagaagagcctgagcctgtcccccggcaagggaggaagcggaggatctggcggttccggaggctcttgtgtggaacccctcggcatggaaaacggcaatatcgccaatagccagattgccgccagcagcgtcagagtgacatttctgggactgcagcactgggtgcccgagctggctagactgaatagagccggcatggtcaacgcctggacacccagcagcaacgacgataacccttggattcaagtgaacctgctgcggcgtatgtgggtcacaggtgttgttacacagggcgcctctagactggccagccacgagtatctgaaggcctttaaggtggcctacagcctgaacggccacgagttcgacttcatccacgacgtgaacaagaagcacaaagagtttgtcggcaactggaacaagaacgccgtgcacgtgaacctgttcgagacacctgtggaagcccagtacgtgcggctgtaccctacaagctgtcacaccgcctgcactctgagattcgaactgctgggatgcgagctgaacggctgtgctaatcctctgggcctgaagaacaacagcatccccgataagcagatcaccgccagctccagctataagacatggggcctgcacctgttcagctggaacccttcttacgccagactggacaagcagggcaacttcaatgcttgggtggccggcagctacggcaatgatcagtggctgcaagtggacctgggcagcagcaaagaagtgacaggcatcatcacccagggcgccagaaatttcggcagcgtgcagtttgtggccagctacaaagtggcctactccaacgacagcgccaactggaccgagtatcaggaccctagaaccggcagctccaagatcttccccggcaattgggacaaccacagccacaagaagaatctgttcgaaacccctatcctggccagatatgtgcgcattctgcccgtggcctggcacaacagaattgccctgagactggaactgctcggctgtggctctcaccaccaccatcaccat

SEQ ID NO: 18 - protein, 613 aa, Artificial Sequence
  source: /note="Description of Artificial Sequence: Synthetic polypeptide"
LDICSKNPCHNGGLCEEISQEVRGDVFPSYTCTCLKGYAGNHCETKGSDKTHTCPPCPAPELLGGPSVFLFPPKPKDTLMISRTPEVTCVVVDVSHEDPEVKFNWYVDGVEVHNAKTKPREEQYNSTYRVVSVLTVLHQDWLNGKEYKCKVSNKALPAPIEKTISKAKGQPREPQVYTLPPCREEMTKNQVSLWCLVKGFYPSDIAVEWESNGQPENNYKTTPPVLDSDGSFFLYSKLTVDKSRWQQGNVFSCSVMHEALHNHYTQKSLSLSPGKGGSGGSGGSGGSCVEPLGMENGNIANSQIAASSVRVTFLGLQHWVPELARLNRAGMVNAWTPSSNDDNPWIQVNLLRRMWVTGVVTQGASRLASHEYLKAFKVAYSLNGHEFDFIHDVNKKHKEFVGNWNKNAVHVNLFETPVEAQYVRLYPTSCHTACTLRFELLGCELNGCANPLGLKNNSIPDKQITASSSYKTWGLHLFSWNPSYARLDKQGNFNAWVAGSYGNDQWLQVDLGSSKEVTGIITQGARNFGSVQFVASYKVAYSNDSANWTEYQDPRTGSSKIFPGNWDNHSHKKNLFETPILARYVRILPVAWHNRIALRLELLGCGSHHHHHH

SEQ ID NO: 19 - DNA, 1839 bp, Artificial Sequence
  source: /note="Description of Artificial Sequence: Synthetic polynucleotide"
ctggacatctgcagcaagaatccttgccacaacggcggcctgtgcgaagagatttctcaagaagtgcggggcgacgttttccccagctacacctgtacatgtctgaagggctacgccggcaaccactgcgagacaaaaggatccgacaagacccacacctgccccccctgcccagccccagagctgctgggcggaccctccgtgttcctgttcccccccaagcccaaggacaccctgatgatcagcaggacccccgaggtgacctgcgtggtggtggacgtgagccacgaggacccagaggtgaagttcaactggtacgtggacggcgtggaggtgcacaacgccaagaccaagcccagagaggagcagtacaacagcacctacagggtggtgtccgtgctgaccgtgctgcaccaggactggctgaacggcaaggaatacaagtgcaaggtctccaacaaggccctgccagcccccatcgaaaagaccatcagcaaggccaagggccagccacgggagccccaggtgtacaccctgcccccctgccgggaggagatgaccaagaaccaggtgtccctgtggtgtctggtgaagggcttctaccccagcgacatcgccgtggagtgggagagcaacggccagcccgagaacaactacaagaccacccccccagtgctggacagcgacggcagcttcttcctgtacagcaagctgaccgtggacaagtccaggtggcagcagggcaacgtgttcagctgcagcgtgatgcacgaggccctgcacaaccactacacccagaagagcctgagcctgtcccccggcaagggaggaagcggaggatctggcggttccggaggctcttgtgtggaacccctcggcatggaaaacggcaatatcgccaatagccagattgccgccagcagcgtcagagtgacatttctgggactgcagcactgggtgcccgagctggctagactgaatagagccggcatggtcaacgcctggacacccagcagcaacgacgataacccttggattcaagtgaacctgctgcggcgtatgtgggtcacaggtgttgttacacagggcgcctctagactggccagccacgagtatctgaaggcctttaaggtggcctacagcctgaacggccacgagttcgacttcatccacgacgtgaacaagaagcacaaagagtttgtcggcaactggaacaagaacgccgtgcacgtgaacctgttcgagacacctgtggaagcccagtacgtgcggctgtaccctacaagctgtcacaccgcctgcactctgagattcgaactgctgggatgcgagctgaacggctgtgctaatcctctgggcctgaagaacaacagcatccccgataagcagatcaccgccagctccagctataagacatggggcctgcacctgttcagctggaacccttcttacgccagactggacaagcagggcaacttcaatgcttgggtggccggcagctacggcaatgatcagtggctgcaagtggacctgggcagcagcaaagaagtgacaggcatcatcacccagggcgccagaaatttcggcagcgtgcagtttgtggccagctacaaagtggcctactccaacgacagcgccaactggaccgagtatcaggaccctagaaccggcagctccaagatcttccccggcaattgggacaaccacagccacaagaagaatctgttcgaaacccctatcctggccagatatgtgcgcattctgcccgtggcctggcacaacagaattgccctgagactggaactgctcggctgtggctctcaccaccaccatcaccat

SEQ ID NO: 20 - protein, 613 aa, Artificial Sequence
  source: /note="Description of Artificial Sequence: Synthetic polypeptide"
LDICSKNPCHNGGLCEEISQEVRGDVFPSYTCTCLKGYAGNHCETKGSDKTHTCPPCPAPELLGGPSVFLFPPKPKDTLMISRTPEVTCVVVDVSHEDPEVKFNWYVDGVEVHNAKTKPREEQYNSTYRVVSVLTVLHQDWLNGKEYKCKVSNKALPAPIEKTISKAKGQPREPQVCTLPPSREEMTKNQVSLSCAVKGFYPSDIAVEWESNGQPENNYKTTPPVLDSDGSFFLVSKLTVDKSRWQQGNVFSCSVMHEALHNHYTQKSLSLSPGKGGSGGSGGSGGSCVEPLGMENGNIANSQIAASSVRVTFLGLQHWVPELARLNRAGMVNAWTPSSNDDNPWIQVNLLRRMWVTGVVTQGASRLASHEYLKAFKVAYSLNGHEFDFIHDVNKKHKEFVGNWNKNAVHVNLFETPVEAQYVRLYPTSCHTACTLRFELLGCELNGCANPLGLKNNSIPDKQITASSSYKTWGLHLFSWNPSYARLDKQGNFNAWVAGSYGNDQWLQVDLGSSKEVTGIITQGARNFGSVQFVASYKVAYSNDSANWTEYQDPRTGSSKIFPGNWDNHSHKKNLFETPILARYVRILPVAWHNRIALRLELLGCGSHHHHHH

SEQ ID NO: 21 - DNA, 1839 bp, Artificial Sequence
  source: /note="Description of Artificial Sequence: Synthetic polynucleotide"
ctggacatctgcagcaagaatccttgccacaacggcggcctgtgcgaagagatttctcaagaagtgcggggcgacgttttccccagctacacctgtacatgtctgaagggctacgccggcaaccactgcgagacaaaaggatccgacaagacccacacctgccccccctgcccagccccagagctgctgggcggaccctccgtgttcctgttcccccccaagcccaaggacaccctgatgatcagcaggacccccgaggtgacctgcgtggtggtggacgtgagccacgaggacccagaggtgaagttcaactggtacgtggacggcgtggaggtgcacaacgccaagaccaagcccagagaggagcagtacaacagcacctacagggtggtgtccgtgctgaccgtgctgcaccaggactggctgaacggcaaggaatacaagtgcaaggtctccaacaaggccctgccagcccccatcgaaaagaccatcagcaaggccaagggccagccacgggagccccaggtgtgcaccctgcccccctcccgggaggagatgaccaagaaccaggtgtccctgtcctgtgcggtgaagggcttctaccccagcgacatcgccgtggagtgggagagcaacggccagcccgagaacaactacaagaccacccccccagtgctggacagcgacggcagcttcttcctggtcagcaagctgaccgtggacaagtccaggtggcagcagggcaacgtgttcagctgcagcgtgatgcacgaggccctgcacaaccactacacccagaagagcctgagcctgtcccccggcaagggaggaagcggaggatctggcggttccggaggctcttgtgtggaacccctcggcatggaaaacggcaatatcgccaatagccagattgccgccagcagcgtcagagtgacatttctgggactgcagcactgggtgcccgagctggctagactgaatagagccggcatggtcaacgcctggacacccagcagcaacgacgataacccttggattcaagtgaacctgctgcggcgtatgtgggtcacaggtgttgttacacagggcgcctctagactggccagccacgagtatctgaaggcctttaaggtggcctacagcctgaacggccacgagttcgacttcatccacgacgtgaacaagaagcacaaagagtttgtcggcaactggaacaagaacgccgtgcacgtgaacctgttcgagacacctgtggaagcccagtacgtgcggctgtaccctacaagctgtcacaccgcctgcactctgagattcgaactgctgggatgcgagctgaacggctgtgctaatcctctgggcctgaagaacaacagcatccccgataagcagatcaccgccagctccagctataagacatggggcctgcacctgttcagctggaacccttcttacgccagactggacaagcagggcaacttcaatgcttgggtggccggcagctacggcaatgatcagtggctgcaagtggacctgggcagcagcaaagaagtgacaggcatcatcacccagggcgccagaaatttcggcagcgtgcagtttgtggccagctacaaagtggcctactccaacgacagcgccaactggaccgagtatcaggaccctagaaccggcagctccaagatcttccccggcaattgggacaaccacagccacaagaagaatctgttcgaaacccctatcctggccagatatgtgcgcattctgcccgtggcctggcacaacagaattgccctgagactggaactgctcggctgtggctctcaccaccaccatcaccat

SEQ ID NO: 22 - protein, 596 aa, Artificial Sequence
  source: /note="Description of Artificial Sequence: Synthetic polypeptide"
LDICSKNPCHNGGLCEEISQEVRGDVFPSYTCTCLKGYAGNHCETKCVEPLGMENGNIANSQIAASSVRVTFLGLQHWVPELARLNRAGMVNAWTPSSNDDNPWIQVNLLRRMWVTGVVTQGASRLASHEYLKAFKVAYSLNGHEFDFIHDVNKKHKEFVGNWNKNAVHVNLFETPVEAQYVRLYPTSCHTACTLRFELLGCELNGCANPLGLKNNSIPDKQITASSSYKTWGLHLFSWNPSYARLDKQGNFNAWVAGSYGNDQWLQVDLGSSKEVTGIITQGARNFGSVQFVASYKVAYSNDSANWTEYQDPRTGSSKIFPGNWDNHSHKKNLFETPILARYVRILPVAWHNRIALRLELLGCGGGGTDKTHTCPPCPAPELLGGPSVFLFPPKPKDTLMISRTPEVTCVVVDVSHEDPEVKFNWYVDGVEVHNAKTKPREEQYNSTYRVVSVLTVLHQDWLNGKEYKCKVSNKALPAPIEKTISKAKGQPREPQVYTLPPSREEMTKNQVSLTCLVKGFYPSDIAVEWESNGQPENNYKTTPPVLDSDGSFFLYSKLTVDKSRWQQGNVFSCSVMHEALHNHYTQKSLSLSPGK

SEQ ID NO: 23 - DNA, 1788 bp, Artificial Sequence
  source: /note="Description of Artificial Sequence: Synthetic polynucleotide"
ctggacatctgcagcaagaacccctgccacaacggcggcctgtgcgaagagatcagccaggaagtgcggggcgacgtgttccccagctacacctgtacctgcctgaagggctacgccggcaaccactgcgagactaagtgcgtggaacccctgggcatggaaaacggcaatatcgccaacagccagatcgccgccagctccgtgcgcgtgacctttctgggactgcagcactgggtgcccgagctggccagactgaacagagccggcatggtgaacgcctggacccccagcagcaacgacgacaacccttggatccaggtgaacctgctgcggcggatgtgggtgacaggcgtggtgacacagggcgccagcagactggccagccacgagtacctgaaggcctttaaggtggcctacagcctgaacggccacgagttcgacttcatccacgacgtgaacaagaaacacaaagaatttgtgggcaactggaacaagaacgccgtgcacgtgaacctgttcgagacacccgtggaagcccagtacgtgcggctgtaccccaccagctgccacaccgcctgcaccctgagattcgagctgctgggctgcgagctgaacggctgcgccaaccccctgggcctgaagaacaacagcatccccgacaagcagatcaccgcctccagcagctacaagacctggggcctgcacctgttcagctggaaccccagctacgcccggctggacaagcagggcaacttcaacgcctgggtggccggcagctacggcaacgaccagtggctgcaggtggacctgggcagcagcaaagaagtgaccggcatcatcacccagggggccagaaacttcggcagcgtgcagttcgtggccagctacaaagtggcctactccaacgacagcgccaactggaccgagtaccaggacccccggaccggcagctccaagatcttccccggcaactgggacaaccacagccacaagaagaatctgttcgaaacccccatcctggccagatacgtgcggatcctgcccgtggcctggcacaaccggatcgccctgagactggaactgctgggatgtgggggaggcggtaccgacaagacccacacctgccccccctgcccagccccagagctgctgggcggaccctccgtgttcctgttcccccccaagcccaaggacaccctgatgatcagcaggacccccgaggtgacctgcgtggtggtggacgtgagccacgaggacccagaggtgaagttcaactggtacgtggacggcgtggaggtgcacaacgccaagaccaagcccagagaggagcagtacaacagcacctacagggtggtgtccgtgctgaccgtgctgcaccaggactggctgaacggcaaggaatacaagtgcaaggtctccaacaaggccctgccagcccccatcgaaaagaccatcagcaaggccaagggccagccacgggagccccaggtgtacaccctgcccccctcccgggaggagatgaccaagaaccaggtgtccctgacctgtctggtgaagggcttctaccccagcgacatcgccgtggagtgggagagcaacggccagcccgagaacaactacaagaccacccccccagtgctggacagcgacggcagcttcttcctgtacagcaagctgaccgtggacaagtccaggtggcagcagggcaacgtgttcagctgcagcgtgatgcacgaggccctgcacaaccactacacccagaagagcctgagcctgtcccccggcaag

SEQ ID NO: 24 - protein, 604 aa, Artificial Sequence
  source: /note="Description of Artificial Sequence: Synthetic polypeptide"
DKTHTCPPCPAPELLGGPSVFLFPPKPKDTLMISRTPEVTCVVVDVSHEDPEVKFNWYVDGVEVHNAKTKPREEQYNSTYRVVSVLTVLHQDWLNGKEYKCKVSNKALPAPIEKTISKAKGQPREPQVYTLPPSREEMTKNQVSLTCLVKGFYPSDIAVEWESNGQPENNYKTTPPVLDSDGSFFLYSKLTVDKSRWQQGNVFSCSVMHEALHNHYTQKSLSLSPGKGSLEVLFQGPGSSLDICSKNPCHNGGLCEEISQEVRGDVFPSYTCTCLKGYAGNHCETKCVEPLGMENGNIANSQIAASSVRVTFLGLQHWVPELARLNRAGMVNAWTPSSNDDNPWIQVNLLRRMWVTGVVTQGASRLASHEYLKAFKVAYSLNGHEFDFIHDVNKKHKEFVGNWNKNAVHVNLFETPVEAQYVRLYPTSCHTACTLRFELLGCELNGCANPLGLKNNSIPDKQITASSSYKTWGLHLFSWNPSYARLDKQGNFNAWVAGSYGNDQWLQVDLGSSKEVTGIITQGARNFGSVQFVASYKVAYSNDSANWTEYQDPRTGSSKIFPGNWDNHSHKKNLFETPILARYVRILPVAWHNRIALRLELLGC

SEQ ID NO: 25 - DNA, 1812 bp, Artificial Sequence
  source: /note="Description of Artificial Sequence: Synthetic polynucleotide"
gacaagacccacacctgtcccccctgccctgctcctgagctgctgggaggacccagcgtgttcctgttcccccccaagcccaaggacaccctgatgatcagccggacccccgaagtgacctgcgtggtggtggacgtgtcccacgaggaccctgaagtgaagttcaattggtacgtggacggcgtggaggtgcacaacgccaagaccaagccccgggaggaacagtacaacagcacctaccgggtggtgtccgtgctgaccgtgctgcaccaggactggctgaacggcaaagaatacaagtgcaaggtgtccaacaaggccctgcctgcccccatcgagaaaaccatcagcaaggccaagggccagcccagagaaccccaggtgtacacactcccaccaagccgggaggaaatgaccaagaaccaggtgtccctgacctgcctggtgaagggcttctaccccagcgacattgccgtggagtgggagagcaacggccagcctgagaacaactacaagaccacccctccagtcctcgattctgatggatctttcttcctgtactccaagctgaccgtggacaagagccggtggcagcagggaaacgtcttttcctgttccgtcatgcatgaggctctccacaatcactacacccagaagtccctgagcctgagccccggcaagggatccctcgaggtgctgtttcagggaccaggcagcagcctggacatctgcagcaagaacccctgccacaacggcggcctgtgcgaagagatcagccaggaagtgcggggcgacgtgttccccagctacacctgtacctgcctgaagggctacgccggcaaccactgcgagactaagtgcgtggaacccctgggaatggaaaacggcaatatcgccaacagccagatcgccgccagctccgtcagagtgacctttctgggactccagcactgggtgcccgagctggccagactgaatagagccggcatggtcaacgcctggacccccagcagcaacgacgacaacccctggattcaagtgaacctgctgcggcgtatgtgggtcaccggcgtcgtgacacagggcgctagcagactggccagccacgagtacctgaaggcctttaaggtggcctacagcctgaacggccacgagttcgacttcatccacgacgtgaacaagaaacacaaagaatttgtgggcaactggaacaagaacgccgtgcacgtgaacctgttcgagacacccgtggaagcccagtacgtgcggctgtaccctaccagctgtcacaccgcctgcaccttaagattcgagctgctgggctgcgagctgaacggctgcgctaatcctctgggcctgaagaacaacagcatccccgacaagcagatcaccgcctccagcagctacaagacctggggactgcacctgttcagctggaaccctagctacgcccggctggacaagcagggcaacttcaatgcttgggtggccggcagctacggcaacgaccagtggctccaggtggacctgggcagcagcaaagaagtgaccggcatcatcacccagggggccagaaacttcggcagcgtgcagttcgtggcctcctacaaagtggcctactccaacgacagcgccaactggaccgagtaccaggaccctagaaccggcagctccaagattttccccggcaactgggataaccacagccacaagaagaatctgttcgaaacccccatcctggcccgctacgtgcgcattctaccggtcgcctggcacaaccggatcgccctgagactggaactgctgggatgc

SEQ ID NO: 26 - protein, 364 aa, Artificial Sequence
  source: /note="Description of Artificial Sequence: Synthetic polypeptide"
LDICSKNPCHNGGLCEEISQEVRGDVFPSYTCTCLKGYAGNHCETKGCANPLGLKNNSIPDKQITASSSYKTWGLHLFSWNPSYARLDKQGNFNAWVAGSYGNDQWLQVDLGSSKEVTGIITQGARNFGSVQFVASYKVAYSNDSANWTEYQDPRTGSSKIFPGNWDNHSHKKNLFETPILARYVRILPVAWHNRIALRLELLGCGCANPLGLKNNSIPDKQITASSSYKTWGLHLFSWNPSYARLDKQGNFNAWVAGSYGNDQWLQVDLGSSKEVTGIITQGARNFGSVQFVASYKVAYSNDSANWTEYQDPRTGSSKIFPGNWDNHSHKKNLFETPILARYVRILPVAWHNRIALRLELLGC

SEQ ID NO: 27 - DNA, 1092 bp, Artificial Sequence
  source: /note="Description of Artificial Sequence: Synthetic polynucleotide"
ctggacatctgcagcaagaacccctgccacaacggcggcctgtgcgaagagatcagccaggaagtgcggggcgacgtgttccccagctacacctgtacctgcctgaagggctacgccggcaaccactgcgagacaaagggctgcgccaaccccctgggcctgaagaacaacagcatccccgacaagcagatcaccgccagcagcagctacaagacctggggcctgcacctgttcagctggaaccccagctacgcccggctggacaagcagggcaacttcaacgcctgggtggccggcagctacggcaacgaccagtggctgcaggtggacctgggcagcagcaaagaagtgaccggcatcatcacccagggcgccagaaacttcggcagcgtgcagttcgtggccagctacaaggtggcctacagcaacgacagcgccaactggaccgagtaccaggacccccggaccggcagctccaagatcttccccggcaactgggacaaccacagccacaagaagaacctgttcgagacacccatcctggccagatacgtgcggatcctgcccgtggcctggcacaaccggatcgccctgagactggaactgctgggctgcggctgtgccaatcctctgggactgaaaaacaattccatccctgataagcagattacagcctccagctcctataagacatgggggctgcatctgttttcttggaacccctcctacgctagactggataagcagggaaatttcaatgcttgggtggccgggtcctatggaaatgatcagtggctgcaggtggacctgggatcctccaaagaagtgacagggattattacacagggggctcggaactttggctctgtgcagtttgtggcttcctacaaagtggcttactccaacgattccgccaattggacagaatatcaggatcccagaaccggctccagcaagatctttcctggaaattgggataatcactcccacaagaaaaatctgtttgaaacccctattctggctcgctatgtgcgcattctgcctgtggcttggcataatagaatcgctctgcggctggaactgctgggatgc

SEQ ID NO: 28 - protein, 967 aa, Artificial Sequence
  source: /note="Description of Artificial Sequence: Synthetic polypeptide"
LDICSKNPCHNGGLCEEISQEVRGDVFPSYTCTCLKGYAGNHCETKCVEPLGMENGNIANSQIAASSVRVTFLGLQHWVPELARLNRAGMVNAWTPSSNDDNPWIQVNLLRRMWVTGVVTQGASRLASHEYLKAFKVAYSLNGHEFDFIHDVNKKHKEFVGNWNKNAVHVNLFETPVEAQYVRLYPTSCHTACTLRFELLGCELNGCANPLGLKNNSIPDKQITASSSYKTWGLHLFSWNPSYARLDKQGNFNAWVAGSYGNDQWLQVDLGSSKEVTGIITQGARNFGSVQFVASYKVAYSNDSANWTEYQDPRTGSSKIFPGNWDNHSHKKNLFETPILARYVRILPVAWHNRIALRLELLGCGGSGGSGGSGGSDAHKSEVAHRFKDLGEENFKALVLIAFAQYLQQSPFEDHVKLVNEVTEFAKTCVADESAENCDKSLHTLFGDKLCTVATLRETYGEMADCCAKQEPERNECFLQHKDDNPNLPRLVRPEVDVMCTAFHDNEETFLKKYLYEIARRHPYFYAPELLFFAKRYKAAFTECCQAADKAACLLPKLDELRDEGKASSAKQRLKCASLQKFGERAFKAWAVARLSQRFPKAEFAEVSKLVTDLTKVHTECCHGDLLECADDRADLAKYICENQDSISSKLKECCEKPLLEKSHCIAEVENDEMPADLPSLAADFVESKDVCKNYAEAKDVFLGMFLYEYARRHPDYSVVLLLRLAKTYETTLEKCCAAADPHECYAKVFDEFKPLVEEPQNLIKQNCELFEQLGEYKFQNALLVRYTKKVPQVSTPTLVEVSRNLGKVGSKCCKHPEAKRMPCAEDYLSVVLNQLCVLHEKTPVSDRVTKCCTESLVNRRPCFSALEVDETYVPKEFNAETFTFHADICTLSEKERQIKKQTALVELVKHKPKATKEQLKAVMDDFAAFVEKCCKADDKETCFAEEGKKLVAASQAALGLHHHHHH

SEQ ID NO: 29 - DNA, 2901 bp, Artificial Sequence
  source: /note="Description of Artificial Sequence: Synthetic polynucleotide"
ctggacatctgcagcaagaacccctgccacaacggcggcctgtgcgaagagatcagccaggaagtgcggggcgacgtgttccccagctacacctgtacctgcctgaagggctacgccggcaaccactgcgagactaagtgcgtggaacccctgggcatggaaaacggcaatatcgccaacagccagatcgccgccagctccgtgcgcgtgacctttctgggactgcagcactgggtgcccgagctggccagactgaacagagccggcatggtgaacgcctggacccccagcagcaacgacgacaacccttggatccaggtgaacctgctgcggcggatgtgggtgacaggcgtggtgacacagggcgccagcagactggccagccacgagtacctgaaggcctttaaggtggcctacagcctgaacggccacgagttcgacttcatccacgacgtgaacaagaaacacaaagaatttgtgggcaactggaacaagaacgccgtgcacgtgaacctgttcgagacacccgtggaagcccagtacgtgcggctgtaccccaccagctgccacaccgcctgcaccctgagattcgagctgctgggctgcgagctgaacggctgcgccaaccccctgggcctgaagaacaacagcatccccgacaagcagatcaccgcctccagcagctacaagacctggggcctgcacctgttcagctggaaccccagctacgcccggctggacaagcagggcaacttcaacgcctgggtggccggcagctacggcaacgaccagtggctgcaggtggacctgggcagcagcaaagaagtgaccggcatcatcacccagggggccagaaacttcggcagcgtgcagttcgtggccagctacaaagtggcctactccaacgacagcgccaactggaccgagtaccaggacccccggaccggcagctccaagatcttccccggcaactgggacaaccacagccacaagaagaatctgttcgaaacccccatcctggccagatacgtgcggatcctgcccgtggcctggcacaaccggatcgccctgagactggaactgctgggatgtggaggaagcggaggatctggcggttccggaggctctgacgcccacaagagcgaggtggcccaccggttcaaggacctgggcgaggaaaacttcaaggccctggtgctgatcgccttcgcccagtacctgcagcagagccccttcgaagatcacgtaaagttagtcaacgaggttacggaattcgcaaagacatgcgttgctgacgaatccgctgagaattgtgacaagagtttgcacactttattcggagataagttgtgtactgtagctactttgagagagacttacggtgaaatggctgactgctgtgcaaaacaggaaccagaacgtaacgaatgtttccttcagcataaggatgataaccctaaccttccaaggcttgttaggccagaagtcgacgtgatgtgcaccgccttccatgataatgaagagacttttcttaaaaagtacctatacgagattgcaaggcgtcatccatatttttacgccccagagctgttgtttttcgcaaagagatacaaagctgcatttactgagtgttgccaagctgccgacaaggccgcttgtttgctaccaaagttggacgaattgagagacgagggtaaggcatcatctgccaagcagagattaaaatgtgcatctttgcaaaaatttggagagagagcttttaaggcatgggctgttgcccgactaagccaaagattcccaaaagccgaatttgctgaagtatccaagctggtgactgatttgactaaagtacatacagaatgttgccatggcgaccttttagaatgtgctgatgacagagcagatttggctaagtatatctgcgaaaatcaagattcaatcagctctaagctgaaggaatgttgcgagaaaccactgttagaaaaatcgcattgtattgctgaagttgaaaatgatgagatgcctgctgacttgccttctcttgccgctgattttgttgagtcgaaggatgtctgtaagaattatgctgaagctaaagacgttttcctgggtatgttcttatatgagtacgcaagacgtcacccagattactctgtggttctgctactgagattggctaaaacatacgagacaacgctggagaagtgctgtgctgccgctgaccctcatgagtgctatgcaaaggtttttgatgaattcaaaccattggttgaagagcctcaaaacttgataaagcagaactgtgagctgtttgagcaattgggtgagtataagttccaaaatgccctgttggtgagatatacaaaaaaggtaccccaagtttcaacgcccactttagttgaagtgtccagaaatcttggtaaagtgggtagcaaatgttgcaagcatccagaagccaagcgaatgccctgtgctgaggattatctgtccgtcgtgttgaaccaattgtgcgtattacacgaaaaaaccccagtctctgatagagtcaccaaatgttgcactgagtcactagttaatagaaggccttgtttttccgctttggaagttgatgaaacctacgtgcctaaggaatttaacgctgagacctttacctttcacgctgacatttgtactttgagtgaaaaagagcgtcaaatcaaaaagcaaaccgctcttgttgaattggtgaaacacaagcctaaggctacgaaggagcagcttaaagccgtcatggacgatttcgccgcatttgttgaaaaatgctgtaaagctgatgacaaggaaacatgtttcgctgaagagggaaagaaattggttgcggccagtcaggccgcacttggtttgcaccatcatcaccatcac

SEQ ID NO: 30 - protein, 965 aa, Artificial Sequence
  source: /note="Description of Artificial Sequence: Synthetic polypeptide"
DAHKSEVAHRFKDLGEENFKALVLIAFAQYLQQSPFEDHVKLVNEVTEFAKTCVADESAENCDKSLHTLFGDKLCTVATLRETYGEMADCCAKQEPERNECFLQHKDDNPNLPRLVRPEVDVMCTAFHDNEETFLKKYLYEIARRHPYFYAPELLFFAKRYKAAFTECCQAADKAACLLPKLDELRDEGKASSAKQRLKCASLQKFGERAFKAWAVARLSQRFPKAEFAEVSKLVTDLTKVHTECCHGDLLECADDRADLAKYICENQDSISSKLKECCEKPLLEKSHCIAEVENDEMPADLPSLAADFVESKDVCKNYAEAKDVFLGMFLYEYARRHPDYSVVLLLRLAKTYETTLEKCCAAADPHECYAKVFDEFKPLVEEPQNLIKQNCELFEQLGEYKFQNALLVRYTKKVPQVSTPTLVEVSRNLGKVGSKCCKHPEAKRMPCAEDYLSVVLNQLCVLHEKTPVSDRVTKCCTESLVNRRPCFSALEVDETYVPKEFNAETFTFHADICTLSEKERQIKKQTALVELVKHKPKATKEQLKAVMDDFAAFVEKCCKADDKETCFAEEGKKLVAASQAGGSGGSGGSGGSLDICSKNPCHNGGLCEEISQEVRGDVFPSYTCTCLKGYAGNHCETKCVEPLGMENGNIANSQIAASSVRVTFLGLQHWVPELARLNRAGMVNAWTPSSNDDNPWIQVNLLRRMWVTGVVTQGASRLASHEYLKAFKVAYSLNGHEFDFIHDVNKKHKEFVGNWNKNAVHVNLFETPVEAQYVRLYPTSCHTACTLRFELLGCELNGCANPLGLKNNSIPDKQITASSSYKTWGLHLFSWNPSYARLDKQGNFNAWVAGSYGNDQWLQVDLGSSKEVTGIITQGARNFGSVQFVASYKVAYSNDSANWTEYQDPRTGSSKIFPGNWDNHSHKKNLFETPILARYVRILPVAWHNRIALRLELLGCGSHHHHHH

SEQ ID NO: 31 - DNA, 2895 bp, Artificial Sequence
  source: /note="Description of Artificial Sequence: Synthetic polynucleotide"
gacgcccacaagagcgaggtggcccaccggttcaaggacctgggcgaggaaaacttcaaggccctggtgctgatcgccttcgcccagtacctgcagcagagccccttcgaagatcacgtaaagttagtcaacgaggttacggaattcgcaaagacatgcgttgctgacgaatccgctgagaattgtgacaagagtttgcacactttattcggagataagttgtgtactgtagctactttgagagagacttacggtgaaatggctgactgctgtgcaaaacaggaaccagaacgtaacgaatgtttccttcagcataaggatgataaccctaaccttccaaggcttgttaggccagaagtcgacgtgatgtgcaccgccttccatgataatgaagagacttttcttaaaaagtacctatacgagattgcaaggcgtcatccatatttttacgccccagagctgttgtttttcgcaaagagatacaaagctgcatttactgagtgttgccaagctgccgacaaggccgcttgtttgctaccaaagttggacgaattgagagacgagggtaaggcatcatctgccaagcagagattaaaatgtgcatctttgcaaaaatttggagagagagcttttaaggcatgggctgttgcccgactaagccaaagattcccaaaagccgaatttgctgaagtatccaagctggtgactgatttgactaaagtacatacagaatgttgccatggcgaccttttagaatgtgctgatgacagagcagatttggctaagtatatctgcgaaaatcaagattcaatcagctctaagctgaaggaatgttgcgagaaaccactgttagaaaaatcgcattgtattgctgaagttgaaaatgatgagatgcctgctgacttgccttctcttgccgctgattttgttgagtcgaaggatgtctgtaagaattatgctgaagctaaagacgttttcctgggtatgttcttatatgagtacgcaagacgtcacccagattactctgtggttctgctactgagattggctaaaacatacgagacaacgctggagaagtgctgtgctgccgctgaccctcatgagtgctatgcaaaggtttttgatgaattcaaaccattggttgaagagcctcaaaacttgataaagcagaactgtgagctgtttgagcaattgggtgagtataagttccaaaatgccctgttggtgagatatacaaaaaaggtaccccaagtttcaacgcccactttagttgaagtgtccagaaatcttggtaaagtgggtagcaaatgttgcaagcatccagaagccaagcgaatgccctgtgctgaggattatctgtccgtcgtgttgaaccaattgtgcgtattacacgaaaaaaccccagtctctgatagagtcaccaaatgttgcactgagtcactagttaatagaaggccttgtttttccgctttggaagttgatgaaacctacgtgcctaaggaatttaacgctgagacctttacctttcacgctgacatttgtactttgagtgaaaaagagcgtcaaatcaaaaagcaaaccgctcttgttgaattggtgaaacacaagcctaaggctacgaaggagcagcttaaagccgtcatggacgatttcgccgcatttgttgaaaaatgctgtaaagctgatgacaaggaaacatgtttcgctgaagagggaaagaaattggttgcggccagtcaggccggaggaagcggaggatctggcggttccggaggctctctagacatctgcagcaagaacccctgccacaacggcggcctgtgcgaagagatcagccaggaagtgcggggcgacgtgttccccagctacacctgtacctgcctgaagggctacgccggcaaccactgcgagactaagtgcgtggaacccctgggcatggaaaacggcaatatcgccaacagccagatcgccgccagctccgtgcgcgtgacctttctgggactgcagcactgggtgcccgagctggccagactgaacagagccggcatggtgaacgcctggacccccagcagcaacgacgacaacccttggatccaggtgaacctgctgcggcggatgtgggtgacaggcgtggtgacacagggcgccagcagactggccagccacgagtacctgaaggcctttaaggtggcctacagcctgaacggccacgagttcgacttcatccacgacgtgaacaagaaacacaaagaatttgtgggcaactggaacaagaacgccgtgcacgtgaacctgttcgagacacccgtggaagcccagtacgtgcggctgtaccccaccagctgccacaccgcctgcaccctgagattcgagctgctgggctgcgagctgaacggctgcgccaaccccctgggcctgaagaacaacagcatccccgacaagcagatcaccgcctccagcagctacaagacctggggcctgcacctgttcagctggaaccccagctacgcccggctggacaagcagggcaacttcaacgcctgggtggccggcagctacggcaacgaccagtggctgcaggtggacctgggcagcagcaaagaagtgaccggcatcatcacccagggggccagaaacttcggcagcgtgcagttcgtggccagctacaaagtggcctactccaacgacagcgccaactggaccgagtaccaggacccccggaccggcagctccaagatcttccccggcaactgggacaaccacagccacaagaagaatctgttcgaaacccccatcctggccagatacgtgcggatcctgcccgtggcctggcacaaccggatcgccctgagactggaactgctgggatgtggctctcaccaccaccatcaccat

SEQ ID NO: 32 - protein, 641 aa, Artificial Sequence
  source: /note="Description of Artificial Sequence: Synthetic polypeptide"
LDICSKNPCHNGGLCEEISQEVRGDVFPSYTCTCLKGYAGNHCETKGSDAHKSEVAHRFKDLGEENFKALVLIAFAQYLQQSPFEDHVKLVNEVTEFAKTCVADESAENCDKSLHTLFGDKLCTVATLRETYGEMADCCAKQEPERNECFLQHKDDNPNLPRLVRPEVDVMCTAFHDNEETFLKKYLYEIARRHPYFYAPELLFFAKRYKAAFTECCQAADKAACLLPKLDELRDEGKASSAKQRLKCASLQKFGERAFKAWAVARLSQRFPKAEFAEVSKLVTDLTKVHTECCHGDLLECADDRADLAKYICENQDSISSKLKECCEKPLLEKSHCIAEVENDEMPADLPSLAADFVESKDVCKNYAEAKDVFLGMFLYEYARRHPDYSVVLLLRLAKTYETTLEKCCAAADPHECYAKVFDEFKPLVEEPQNLIKQNCELFEQLGEYKFQNALLVRYTKKVPQVSTPTLVEVSRNLGKVGSKCCKHPEAKRMPCAEDYLSVVLNQLCVLHEKTPVSDRVTKCCTESLVNRRPCFSALEVDETYVPKEFNAETFTFHADICTLSEKERQIKKQTALVELVKHKPKATKEQLKAVMDDFAAFVEKCCKADDKETCFAEEGKKLVAASQAALGLGSHHHHHH

SEQ ID NO: 33 - DNA, 1923 bp, Artificial Sequence
  source: /note="Description of Artificial Sequence: Synthetic polynucleotide"
ctggacatctgcagcaagaatccttgccacaacggcggcctgtgcgaagagatttctcaagaagtgcggggcgacgttttccccagctacacctgtacatgtctgaagggctacgccggcaaccactgcgagacaaaaggatccgatgctcacaagagcgaggtggcccacagattcaaggatctgggcgaagagaacttcaaggccctggtgctgatcgccttcgctcagtatctccagcagagccctttcgaggaccacgtgaagctggtcaacgaagtgaccgagttcgccaagacctgtgtggccgatgagagcgccgagaactgtgataagagcctgcacaccctgttcggcgacaagctgtgtacagtggccacactgagagaaacctacggcgagatggccgactgctgtgccaagcaagagcccgagagaaacgagtgcttcctgcagcacaaggacgacaaccccaacctgcctagactcgtgcgacccgaagtggatgtgatgtgcaccgcctttcacgacaacgaggaaaccttcctgaagaagtacctgtacgagatcgccagacggcacccctacttttatgcccctgagctgctgttcttcgccaagcggtataaggccgccttcaccgaatgttgccaggccgctgataaggctgcctgtctgctgcctaagctggacgagctgagagatgagggcaaagccagctctgccaagcagagactgaagtgcgccagcctgcagaagttcggcgagagagcttttaaggcctgggccgttgccagactgagccagagatttcctaaggccgagtttgccgaggtgtccaagctcgtgaccgatctgacaaaggtgcacaccgagtgctgtcacggcgatctgctggaatgtgccgacgatagagccgacctggccaagtacatctgcgagaaccaggacagcatcagcagcaagctgaaagagtgctgcgagaagcccctgctggaaaagtctcactgtatcgccgaggtggaaaacgacgagatgcctgccgatctgcctagcctggctgccgatttcgtggaaagcaaggacgtgtgcaagaactacgccgaggccaaggatgtgtttctgggcatgtttctgtatgagtacgcccgcagacaccccgactattctgtggttctgctgctgcggctggccaaaacctacgagacaaccctggaaaaatgctgcgccgctgccgatcctcacgagtgttatgccaaggtgttcgacgagttcaagcctctggtggaagaaccccagaacctgatcaagcagaactgcgagctgttcgagcagctgggcgagtacaagttccagaatgccctgctcgtgcggtacaccaagaaagtgcctcaggtgtccacacctacactggttgaggtgtcccggaatctgggcaaagtgggcagcaagtgttgcaagcaccctgaggccaagagaatgccttgcgccgaggattacctgagcgtggtgctgaatcagctgtgcgtgctgcacgagaaaacccctgtgtccgacagagtgaccaagtgctgtaccgagagcctcgtgaacagaaggccttgctttagcgccctggaagtggacgagacatacgtgcccaaagagttcaacgccgagacattcaccttccacgccgacatctgtaccctgagcgagaaagagcggcagatcaagaagcagacagccctggtcgagctggttaagcacaagcccaaggccaccaaagaacagctgaaggccgtgatggacgacttcgccgcctttgtcgagaagtgctgcaaggccgacgacaaagagacatgcttcgccgaagagggcaagaaactggtggctgcctctcaggctgctctcggacttggctctcaccaccaccatcaccat

SEQ ID NO: 34 - protein, 809 aa, Artificial Sequence
  source: /note="Description of Artificial Sequence: Synthetic polypeptide"
LDICSKNPCHNGGLCEEISQEVRGDVFPSYTCTCLKGYAGNHCETKGSDAHKSEVAHRFKDLGEENFKALVLIAFAQYLQQSPFEDHVKLVNEVTEFAKTCVADESAENCDKSLHTLFGDKLCTVATLRETYGEMADCCAKQEPERNECFLQHKDDNPNLPRLVRPEVDVMCTAFHDNEETFLKKYLYEIARRHPYFYAPELLFFAKRYKAAFTECCQAADKAACLLPKLDELRDEGKASSAKQRLKCASLQKFGERAFKAWAVARLSQRFPKAEFAEVSKLVTDLTKVHTECCHGDLLECADDRADLAKYICENQDSISSKLKECCEKPLLEKSHCIAEVENDEMPADLPSLAADFVESKDVCKNYAEAKDVFLGMFLYEYARRHPDYSVVLLLRLAKTYETTLEKCCAAADPHECYAKVFDEFKPLVEEPQNLIKQNCELFEQLGEYKFQNALLVRYTKKVPQVSTPTLVEVSRNLGKVGSKCCKHPEAKRMPCAEDYLSVVLNQLCVLHEKTPVSDRVTKCCTESLVNRRPCFSALEVDETYVPKEFNAETFTFHADICTLSEKERQIKKQTALVELVKHKPKATKEQLKAVMDDFAAFVEKCCKADDKETCFAEEGKKLVAASQAALGLGGSGGSGGSGGSCVEPLGMENGNIANSQIAASSVRVTFLGLQHWVPELARLNRAGMVNAWTPSSNDDNPWIQVNLLRRMWVTGVVTQGASRLASHEYLKAFKVAYSLNGHEFDFIHDVNKKHKEFVGNWNKNAVHVNLFETPVEAQYVRLYPTSCHTACTLRFELLGCGSHHHHHH

SEQ ID NO: 35 - DNA, 2427 bp, Artificial Sequence
  source: /note="Description of Artificial Sequence: Synthetic polynucleotide"
ctggacatctgcagcaagaatccttgccacaacggcggcctgtgcgaagagatttctcaagaagtgcggggcgacgttttccccagctacacctgtacatgtctgaagggctacgccggcaaccactgcgagacaaaaggatccgatgctcacaagagcgaggtggcccacagattcaaggatctgggcgaagagaacttcaaggccctggtgctgatcgccttcgctcagtatctccagcagagccctttcgaggaccacgtgaagctggtcaacgaagtgaccgagttcgccaagacctgtgtggccgatgagagcgccgagaactgtgataagagcctgcacaccctgttcggcgacaagctgtgtacagtggccacactgagagaaacctacggcgagatggccgactgctgtgccaagcaagagcccgagagaaacgagtgcttcctgcagcacaaggacgacaaccccaacctgcctagactcgtgcgacccgaagtggatgtgatgtgcaccgcctttcacgacaacgaggaaaccttcctgaagaagtacctgtacgagatcgccagacggcacccctacttttatgcccctgagctgctgttcttcgccaagcggtataaggccgccttcaccgaatgttgccaggccgctgataaggctgcctgtctgctgcctaagctggacgagctgagagatgagggcaaagccagctctgccaagcagagactgaagtgcgccagcctgcagaagttcggcgagagagcttttaaggcctgggccgttgccagactgagccagagatttcctaaggccgagtttgccgaggtgtccaagctcgtgaccgatctgacaaaggtgcacaccgagtgctgtcacggcgatctgctggaatgtgccgacgatagagccgacctggccaagtacatctgcgagaaccaggacagcatcagcagcaagctgaaagagtgctgcgagaagcccctgctggaaaagtctcactgtatcgccgaggtggaaaacgacgagatgcctgccgatctgcctagcctggctgccgatttcgtggaaagcaaggacgtgtgcaagaactacgccgaggccaaggatgtgtttctgggcatgtttctgtatgagtacgcccgcagacaccccgactattctgtggttctgctgctgcggctggccaaaacctacgagacaaccctggaaaaatgctgcgccgctgccgatcctcacgagtgttatgccaaggtgttcgacgagttcaagcctctggtggaagaaccccagaacctgatcaagcagaactgcgagctgttcgagcagctgggcgagtacaagttccagaatgccctgctcgtgcggtacaccaagaaagtgcctcaggtgtccacacctacactggttgaggtgtcccggaatctgggcaaagtgggcagcaagtgttgcaagcaccctgaggccaagagaatgccttgcgccgaggattacctgagcgtggtgctgaatcagctgtgcgtgctgcacgagaaaacccctgtgtccgacagagtgaccaagtgctgtaccgagagcctcgtgaacagaaggccttgctttagcgccctggaagtggacgagacatacgtgcccaaagagttcaacgccgagacattcaccttccacgccgacatctgtaccctgagcgagaaagagcggcagatcaagaagcagacagccctggtcgagctggttaagcacaagcccaaggccaccaaagaacagctgaaggccgtgatggacgacttcgccgcctttgtcgagaagtgctgcaaggccgacgacaaagagacatgcttcgccgaagagggcaagaaactggtggctgcctctcaggctgctctcggacttggaggaagcggaggatctggcggttccggaggctcttgtgtggaacccctcggcatggaaaacggcaatatcgccaatagccagattgccgccagcagcgtcagagtgacatttctgggactgcagcactgggtgcccgagctggctagactgaatagagccggcatggtcaacgcctggacacccagcagcaacgacgataacccttggattcaagtgaacctgctgcggcgtatgtgggtcacaggtgttgttacacagggcgcctctagactggccagccacgagtatctgaaggcctttaaggtggcctacagcctgaacggccacgagttcgacttcatccacgacgtgaacaagaagcacaaagagtttgtcggcaactggaacaagaacgccgtgcacgtgaacctgttcgagacacctgtggaagcccagtacgtgcggctgtaccctacaagctgtcacaccgcctgcactctgagattcgaactgctgggatgcggctctcaccaccaccatcaccat

SEQ ID NO: 36 - protein, 811 aa, Artificial Sequence
  source: /note="Description of Artificial Sequence: Synthetic polypeptide"
LDICSKNPCHNGGLCEEISQEVRGDVFPSYTCTCLKGYAGNHCETKGSDAHKSEVAHRFKDLGEENFKALVLIAFAQYLQQSPFEDHVKLVNEVTEFAKTCVADESAENCDKSLHTLFGDKLCTVATLRETYGEMADCCAKQEPERNECFLQHKDDNPNLPRLVRPEVDVMCTAFHDNEETFLKKYLYEIARRHPYFYAPELLFFAKRYKAAFTECCQAADKAACLLPKLDELRDEGKASSAKQRLKCASLQKFGERAFKAWAVARLSQRFPKAEFAEVSKLVTDLTKVHTECCHGDLLECADDRADLAKYICENQDSISSKLKECCEKPLLEKSHCIAEVENDEMPADLPSLAADFVESKDVCKNYAEAKDVFLGMFLYEYARRHPDYSVVLLLRLAKTYETTLEKCCAAADPHECYAKVFDEFKPLVEEPQNLIKQNCELFEQLGEYKFQNALLVRYTKKVPQVSTPTLVEVSRNLGKVGSKCCKHPEAKRMPCAEDYLSVVLNQLCVLHEKTPVSDRVTKCCTESLVNRRPCFSALEVDETYVPKEFNAETFTFHADICTLSEKERQIKKQTALVELVKHKPKATKEQLKAVMDDFAAFVEKCCKADDKETCFAEEGKKLVAASQAALGLGGSGGSGGSGGSCANPLGLKNNSIPDKQITASSSYKTWGLHLFSWNPSYARLDKQGNFNAWVAGSYGNDQWLQVDLGSSKEVTGIITQGARNFGSVQFVASYKVAYSNDSANWTEYQDPRTGSSKIFPGNWDNHSHKKNLFETPILARYVRILPVAWHNRIALRLELLGCGSHHHHHH

SEQ ID NO: 37 - DNA, 2433 bp, Artificial Sequence
  source: /note="Description of Artificial Sequence: Synthetic polynucleotide"
ctggacatctgcagcaagaatccttgccacaacggcggcctgtgcgaagagatttctcaagaagtgcggggcgacgttttccccagctacacctgtacatgtctgaagggctacgccggcaaccactgcgagacaaaaggatccgacgcccacaagagcgaggtggcccaccggttcaaggacctgggcgaggaaaacttcaaggccctggtgctgatcgccttcgcccagtacctgcagcagagccccttcgaagatcacgtaaagttagtcaacgaggttacggaattcgcaaagacatgcgttgctgacgaatccgctgagaattgtgacaagagtttgcacactttattcggagataagttgtgtactgtagctactttgagagagacttacggtgaaatggctgactgctgtgcaaaacaggaaccagaacgtaacgaatgtttccttcagcataaggatgataaccctaaccttccaaggcttgttaggccagaagtcgacgtgatgtgcaccgccttccatgataatgaagagacttttcttaaaaagtacctatacgagattgcaaggcgtcatccatatttttacgccccagagctgttgtttttcgcaaagagatacaaagctgcatttactgagtgttgccaagctgccgacaaggccgcttgtttgctaccaaagttggacgaattgagagacgagggtaaggcatcatctgccaagcagagattaaaatgtgcatctttgcaaaaatttggagagagagcttttaaggcatgggctgttgcccgactaagccaaagattcccaaaagccgaatttgctgaagtatccaagctggtgactgatttgactaaagtacatacagaatgttgccatggcgaccttttagaatgtgctgatgacagagcagatttggctaagtatatctgcgaaaatcaagattcaatcagctctaagctgaaggaatgttgcgagaaaccactgttagaaaaatcgcattgtattgctgaagttgaaaatgatgagatgcctgctgacttgccttctcttgccgctgattttgttgagtcgaaggatgtctgtaagaattatgctgaagctaaagacgttttcctgggtatgttcttatatgagtacgcaagacgtcacccagattactctgtggttctgctactgagattggctaaaacatacgagacaacgctggagaagtgctgtgctgccgctgaccctcatgagtgctatgcaaaggtttttgatgaattcaaaccattggttgaagagcctcaaaacttgataaagcagaactgtgagctgtttgagcaattgggtgagtataagttccaaaatgccctgttggtgagatatacaaaaaaggtaccccaagtttcaacgcccactttagttgaagtgtccagaaatcttggtaaagtgggtagcaaatgttgcaagcatccagaagccaagcgaatgccctgtgctgaggattatctgtccgtcgtgttgaaccaattgtgcgtattacacgaaaaaaccccagtctctgatagagtcaccaaatgttgcactgagtcactagttaatagaaggccttgtttttccgctttggaagttgatgaaacctacgtgcctaaggaatttaacgctgagacctttacctttcacgctgacatttgtactttgagtgaaaaagagcgtcaaatcaaaaagcaaaccgctcttgttgaattggtgaaacacaagcctaaggctacgaaggagcagcttaaagccgtcatggacgatttcgccgcatttgttgaaaaatgctgtaaagctgatgacaaggaaacatgtttcgctgaagagggaaagaaattggttgcggccagtcaggccgcacttggtttgggaggaagcggaggatctggcggttccggaggctcttgcgccaaccccctgggcctgaagaacaacagcatccccgacaagcagatcaccgcctccagcagctacaagacctggggcctgcacctgttcagctggaaccccagctacgcccggctggacaagcagggcaacttcaacgcctgggtggccggcagctacggcaacgaccagtggctgcaggtggacctgggcagcagcaaagaagtgaccggcatcatcacccagggggccagaaacttcggcagcgtgcagttcgtggccagctacaaagtggcctactccaacgacagcgccaactggaccgagtaccaggacccccggaccggcagctccaagatcttccccggcaactgggacaaccacagccacaagaagaatctgttcgaaacccccatcctggccagatacgtgcggatcctgcccgtggcctggcacaaccggatcgccctgagactggaactgctgggatgtggctctcaccaccaccatcaccat

SEQ ID NO: 38 - protein, 971 aa, Artificial Sequence
  source: /note="Description of Artificial Sequence: Synthetic polypeptide"
LDICSKNPCHNGGLCEEISQEVRGEVFPSYTCTCLKGYAGNHCETKGSDAHKSEVAHRFKDLGEENFKALVLIAFAQYLQQSPFEDHVKLVNEVTEFAKTCVADESAENCDKSLHTLFGDKLCTVATLRETYGEMADCCAKQEPERNECFLQHKDDNPNLPRLVRPEVDVMCTAFHDNEETFLKKYLYEIARRHPYFYAPELLFFAKRYKAAFTECCQAADKAACLLPKLDELRDEGKASSAKQRLKCASLQKFGERAFKAWAVARLSQRFPKAEFAEVSKLVTDLTKVHTECCHGDLLECADDRADLAKYICENQDSISSKLKECCEKPLLEKSHCIAEVENDEMPADLPSLAADFVESKDVCKNYAEAKDVFLGMFLYEYARRHPDYSVVLLLRLAKTYETTLEKCCAAADPHECYAKVFDEFKPLVEEPQNLIKQNCELFEQLGEYKFQNALLVRYTKKVPQVSTPTLVEVSRNLGKVGSKCCKHPEAKRMPCAEDYLSVVLNQLCVLHEKTPVSDRVTKCCTESLVNRRPCFSALEVDETYVPKEFNAETFTFHADICTLSEKERQIKKQTALVELVKHKPKATKEQLKAVMDDFAAFVEKCCKADDKETCFAEEGKKLVAASQAALGLGGSGGSGGSGGSCVEPLGMENGNIANSQIAASSVRVTFLGLQHWVPELARLNRAGMVNAWTPSSNDDNPWIQVNLLRRMWVTGVVTQGASRLASHEYLKAFKVAYSLNGHEFDFIHDVNKKHKEFVGNWNKNAVHVNLFETPVEAQYVRLYPTSCHTACTLRFELLGCELNGCANPLGLKNNSIPDKQITASSSYKTWGLHLFSWNPSYARLDKQGNFNAWVAGSYGNDQWLQVDLGSSKEVTGIITQGARNFGSVQFVASYKVAYSNDSANWTEYQDPRTGSSKIFPGNWDNHSHKKNLFETPILARYVRILPVAWHNRIALRLELLGCGSHHHHHH

SEQ ID NO: 39 - DNA, 2913 bp, Artificial Sequence
  source: /note="Description of Artificial Sequence: Synthetic polynucleotide"
ctggacatctgcagcaagaatccttgccacaacggcggcctgtgcgaagagatttctcaagaagtgcggggcgaggttttccccagctacacctgtacatgtctgaagggctacgccggcaaccactgcgagacaaaaggatccgatgctcacaagagcgaggtggcccacagattcaaggatctgggcgaagagaacttcaaggccctggtgctgatcgccttcgctcagtatctccagcagagccctttcgaggaccacgtgaagctggtcaacgaagtgaccgagttcgccaagacctgtgtggccgatgagagcgccgagaactgtgataagagcctgcacaccctgttcggcgacaagctgtgtacagtggccacactgagagaaacctacggcgagatggccgactgctgtgccaagcaagagcccgagagaaacgagtgcttcctgcagcacaaggacgacaaccccaacctgcctagactcgtgcgacccgaagtggatgtgatgtgcaccgcctttcacgacaacgaggaaaccttcctgaagaagtacctgtacgagatcgccagacggcacccctacttttatgcccctgagctgctgttcttcgccaagcggtataaggccgccttcaccgaatgttgccaggccgctgataaggctgcctgtctgctgcctaagctggacgagctgagagatgagggcaaagccagctctgccaagcagagactgaagtgcgccagcctgcagaagttcggcgagagagcttttaaggcctgggccgttgccagactgagccagagatttcctaaggccgagtttgccgaggtgtccaagctcgtgaccgatctgacaaaggtgcacaccgagtgctgtcacggcgatctgctggaatgtgccgacgatagagccgacctggccaagtacatctgcgagaaccaggacagcatcagcagcaagctgaaagagtgctgcgagaagcccctgctggaaaagtctcactgtatcgccgaggtggaaaacgacgagatgcctgccgatctgcctagcctggctgccgatttcgtggaaagcaaggacgtgtgcaagaactacgccgaggccaaggatgtgtttctgggcatgtttctgtatgagtacgcccgcagacaccccgactattctgtggttctgctgctgcggctggccaaaacctacgagacaaccctggaaaaatgctgcgccgctgccgatcctcacgagtgttatgccaaggtgttcgacgagttcaagcctctggtggaagaaccccagaacctgatcaagcagaactgcgagctgttcgagcagctgggcgagtacaagttccagaatgccctgctcgtgcggtacaccaagaaagtgcctcaggtgtccacacctacactggttgaggtgtcccggaatctgggcaaagtgggcagcaagtgttgcaagcaccctgaggccaagagaatgccttgcgccgaggattacctgagcgtggtgctgaatcagctgtgcgtgctgcacgagaaaacccctgtgtccgacagagtgaccaagtgctgtaccgagagcctcgtgaacagaaggccttgctttagcgccctggaagtggacgagacatacgtgcccaaagagttcaacgccgagacattcaccttccacgccgacatctgtaccctgagcgagaaagagcggcagatcaagaagcagacagccctggtcgagctggttaagcacaagcccaaggccaccaaagaacagctgaaggccgtgatggacgacttcgccgcctttgtcgagaagtgctgcaaggccgacgacaaagagacatgcttcgccgaagagggcaagaaactggtggctgcctctcaggctgctctcggacttggaggaagcggaggatctggcggttccggaggctcttgtgtggaacccctcggcatggaaaacggcaatatcgccaatagccagattgccgccagcagcgtcagagtgacatttctgggactgcagcactgggtgcccgagctggctagactgaatagagccggcatggtcaacgcctggacacccagcagcaacgacgataacccttggattcaagtgaacctgctgcggcgtatgtgggtcacaggtgttgttacacagggcgcctctagactggccagccacgagtatctgaaggcctttaaggtggcctacagcctgaacggccacgagttcgacttcatccacgacgtgaacaagaagcacaaagagtttgtcggcaactggaacaagaacgccgtgcacgtgaacctgttcgagacacctgtggaagcccagtacgtgcggctgtaccctacaagctgtcacaccgcctgcactctgagattcgaactgctgggatgcgagctgaacggctgtgctaatcctctgggcctgaagaacaacagcatccccgataagcagatcaccgccagctccagctataagacatggggcctgcacctgttcagctggaacccttcttacgccagactggacaagcagggcaacttcaatgcttgggtggccggcagctacggcaatgatcagtggctgcaagtggacctgggcagcagcaaagaagtgacaggcatcatcacccagggcgccagaaatttcggcagcgtgcagtttgtggccagctacaaagtggcctactccaacgacagcgccaactggaccgagtatcaggaccctagaaccggcagctccaagatcttccccggcaattgggacaaccacagccacaagaagaatctgttcgaaacccctatcctggccagatatgtgcgcattctgcccgtggcctggcacaacagaattgccctgagactggaactgctcggctgtggctctcaccaccaccatcaccat

SEQ ID NO: 40 - protein, 592 aa, Artificial Sequence
  source: /note="Description of Artificial Sequence: Synthetic polypeptide"
LDICSKNPCHNGGLCEEISQEVRGDVFPSYTCTCLKGYAGNHCETKGSLVEEPQNLIKQNCELFEQLGEYKFQNALLVRYTKKVPQVSTPTLVEVSRNLGKVGSKCCKHPEAKRMPCAEDCLSVFLNQLCVLHEKTPVSDRVTKCCTESLVNGRPCFSALEVDETYVPKEFNAETFTFHADICTLSEKERQIKKQTALVELVKHKPKATKEQLKAVMDDFAAFVEKCCKADDKETCFAEEGKKLVAASQAALGLGGSGGSGGSGGSCVEPLGMENGNIANSQIAASSVRVTFLGLQHWVPELARLNRAGMVNAWTPSSNDDNPWIQVNLLRRMWVTGVVTQGASRLASHEYLKAFKVAYSLNGHEFDFIHDVNKKHKEFVGNWNKNAVHVNLFETPVEAQYVRLYPTSCHTACTLRFELLGCELNGCANPLGLKNNSIPDKQITASSSYKTWGLHLFSWNPSYARLDKQGNFNAWVAGSYGNDQWLQVDLGSSKEVTGIITQGARNFGSVQFVASYKVAYSNDSANWTEYQDPRTGSSKIFPGNWDNHSHKKNLFETPILARYVRILPVAWHNRIALRLELLGCGSHHHHHH

SEQ ID NO: 41 - DNA, 1776 bp, Artificial Sequence
  source: /note="Description of Artificial Sequence: Synthetic polynucleotide"
ctggacatctgcagcaagaatccttgccacaacggcggcctgtgcgaagagatttctcaagaagtgcggggcgacgttttccccagctacacctgtacatgtctgaagggctacgccggcaaccactgcgagacaaaaggatccctggtggaagaaccccagaacctgatcaagcagaactgcgagctgttcgagcagctgggcgagtacaagttccagaatgccctgctcgtgcggtacaccaagaaagtgcctcaggtgtccacacctacactggtcgaggtgtccagaaacctgggcaaagtgggcagcaagtgctgcaagcaccctgaggccaaaagaatgccttgcgccgaggattgcctgagcgtgttcctgaatcagctgtgcgtgctgcacgagaaaacccctgtgtccgacagagtgaccaagtgctgtaccgagagcctggtcaacggcagaccttgctttagcgccctggaagtggatgagacatacgtgcccaaagagttcaacgccgagacattcaccttccacgccgacatctgtaccctgagcgagaaagagcggcagatcaagaagcagacagccctggtcgagctggtcaagcacaagcctaaggccaccaaagaacagctgaaggccgtgatggacgacttcgccgccttcgtggaaaagtgttgcaaggccgacgacaaagagacatgcttcgccgaagagggcaagaaactggtggctgcctctcaggctgctctcggacttggaggaagcggaggatctggcggttccggaggctcttgtgtggaacccctcggcatggaaaacggcaatatcgccaatagccagatcgccgccagcagcgtcagagtgacatttctgggactgcagcactgggtgccagagctggctagactgaatagagccggcatggtcaacgcctggacacccagcagcaacgacgacaacccctggattcaagtgaacctgctgcggcgtatgtgggtcacaggtgttgttacacagggcgcctctagactggccagccacgagtatctgaaggcctttaaggtggcctacagcctgaacggccacgagttcgacttcatccacgacgtgaacaagaagcacaaagagtttgtcggcaactggaacaagaacgccgtgcacgtgaacctgttcgagacacctgtggaagcccagtacgtgcggctgtaccctacaagctgtcacaccgcctgcacactgagattcgaactgctgggatgcgagctgaacggctgtgctaatcctctgggcctgaagaacaacagcatccccgataagcagatcaccgcctccagcagctataagacatggggcctgcacctgttcagctggaaccctagctacgccagactggacaagcagggcaactttaatgcctgggtggccggcagctacggcaatgatcaatggctgcaagtggacctgggcagcagcaaagaagtgaccggcatcattacccagggcgcaagaaatttcggcagcgtgcagttcgtggccagctacaaagtggcctactccaacgacagcgccaactggaccgagtatcaggaccctagaaccggcagctccaagatcttccccggcaattgggacaaccacagccacaagaagaatctgttcgaaacccctatcctggccagatatgtgcgcattctgcccgtggcctggcacaacagaattgccctgagactggaactgctcggctgtggctctcaccaccaccatcaccat

SEQ ID NO: 42 - protein, 963 aa, Artificial Sequence
  source: /note="Description of Artificial Sequence: Synthetic polypeptide"
LDICSKNPCHNGGLCEEISQEVRGDVFPSYTCTCLKGYAGNHCETKGSDAHKSEVAHRFKDLGEENFKALVLIAFAQYLQQSPFEDHVKLVNEVTEFAKTCVADESAENCDKSLHTLFGDKLCTVATLRETYGEMADCCAKQEPERNECFLQHKDDNPNLPRLVRPEVDVMCTAFHDNEETFLKKYLYEIARRHPYFYAPELLFFAKRYKAAFTECCQAADKAACLLPKLDELRDEGKASSAKQRLKCASLQKFGERAFKAWAVARLSQRFPKAEFAEVSKLVTDLTKVHTECCHGDLLECADDRADLAKYICENQDSISSKLKECCEKPLLEKSHCIAEVENDEMPADLPSLAADFVESKDVCKNYAEAKDVFLGMFLYEYARRHPDYSVVLLLRLAKTYETTLEKCCAAADPHECYAKVFDEFKPLVEEPQNLIKQNCELFEQLGEYKFQNALLVRYTKKVPQVSTPTLVEVSRNLGKVGSKCCKHPEAKRMPCAEDYLSVVLNQLCVLHEKTPVSDRVTKCCTESLVNRRPCFSALEVDETYVPKEFNAETFTFHADICTLSEKERQIKKQTALVELVKHKPKATKEQLKAVMDDFAAFVEKCCKADDKETCFAEEGKKLVAASQAALGLGGSGGSGGSGGSCVEPLGMENGNIANSQIAASSVRVTFLGLQHWVPELARLNRAGMVNAWTPSSNDDNPWIQVNLLRRMWVTGVVTQGASRLASHEYLKAFKVAYSLNGHEFDFIHDVNKKHKEFVGNWNKNAVHVNLFETPVEAQYVRLYPTSCHTACTLRFELLGCELNGCANPLGLKNNSIPDKQITASSSYKTWGLHLFSWNPSYARLDKQGNFNAWVAGSYGNDQWLQVDLGSSKEVTGIITQGARNFGSVQFVASYKVAYSNDSANWTEYQDPRTGSSKIFPGNWDNHSHKKNLFETPILARYVRILPVAWHNRIALRLELLGC

SEQ ID NO: 43 - DNA, 2889 bp, Artificial Sequence
  source: /note="Description of Artificial Sequence: Synthetic polynucleotide"
ctggacatctgcagcaagaatccttgccacaacggcggcctgtgcgaagagatttctcaagaagtgcggggcgacgttttccccagctacacctgtacatgtctgaagggctacgccggcaaccactgcgagacaaaaggatccgatgctcacaagagcgaggtggcccacagattcaaggatctgggcgaagagaacttcaaggccctggtgctgatcgccttcgctcagtatctccagcagagccctttcgaggaccacgtgaagctggtcaacgaagtgaccgagttcgccaagacctgtgtggccgatgagagcgccgagaactgtgataagagcctgcacaccctgttcggcgacaagctgtgtacagtggccacactgagagaaacctacggcgagatggccgactgctgtgccaagcaagagcccgagagaaacgagtgcttcctgcagcacaaggacgacaaccccaacctgcctagactcgtgcgacccgaagtggatgtgatgtgcaccgcctttcacgacaacgaggaaaccttcctgaagaagtacctgtacgagatcgccagacggcacccctacttttatgcccctgagctgctgttcttcgccaagcggtataaggccgccttcaccgaatgttgccaggccgctgataaggctgcctgtctgctgcctaagctggacgagctgagagatgagggcaaagccagctctgccaagcagagactgaagtgcgccagcctgcagaagttcggcgagagagcttttaaggcctgggccgttgccagactgagccagagatttcctaaggccgagtttgccgaggtgtccaagctcgtgaccgatctgacaaaggtgcacaccgagtgctgtcacggcgatctgctggaatgtgccgacgatagagccgacctggccaagtacatctgcgagaaccaggacagcatcagcagcaagctgaaagagtgctgcgagaagcccctgctggaaaagtctcactgtatcgccgaggtggaaaacgacgagatgcctgccgatctgcctagcctggctgccgatttcgtggaaagcaaggacgtgtgcaagaactacgccgaggccaaggatgtgtttctgggcatgtttctgtatgagtacgcccgcagacaccccgactattctgtggttctgctgctgcggctggccaaaacctacgagacaaccctggaaaaatgctgcgccgctgccgatcctcacgagtgttatgccaaggtgttcgacgagttcaagcctctggtggaagaaccccagaacctgatcaagcagaactgcgagctgttcgagcagctgggcgagtacaagttccagaatgccctgctcgtgcggtacaccaagaaagtgcctcaggtgtccacacctacactggttgaggtgtcccggaatctgggcaaagtgggcagcaagtgttgcaagcaccctgaggccaagagaatgccttgcgccgaggattacctgagcgtggtgctgaatcagctgtgcgtgctgcacgagaaaacccctgtgtccgacagagtgaccaagtgctgtaccgagagcctcgtgaacagaaggccttgctttagcgccctggaagtggacgagacatacgtgcccaaagagttcaacgccgagacattcaccttccacgccgacatctgtaccctgagcgagaaagagcggcagatcaagaagcagacagccctggtcgagctggttaagcacaagcccaaggccaccaaagaacagctgaaggccgtgatggacgacttcgccgcctttgtcgagaagtgctgcaaggccgacgacaaagagacatgcttcgccgaagagggcaagaaactggtggctgcctctcaggctgctctcggacttggaggaagcggaggatctggcggttccggaggctcttgtgtggaacccctcggcatggaaaacggcaatatcgccaatagccagattgccgccagcagcgtcagagtgacatttctgggactgcagcactgggtgcccgagctggctagactgaatagagccggcatggtcaacgcctggacacccagcagcaacgacgataacccttggattcaagtgaacctgctgcggcgtatgtgggtcacaggtgttgttacacagggcgcctctagactggccagccacgagtatctgaaggcctttaaggtggcctacagcctgaacggccacgagttcgacttcatccacgacgtgaacaagaagcacaaagagtttgtcggcaactggaacaagaacgccgtgcacgtgaacctgttcgagacacctgtggaagcccagtacgtgcggctgtaccctacaagctgtcacaccgcctgcactctgagattcgaactgctgggatgcgagctgaacggctgtgctaatcctctgggcctgaagaacaacagcatccccgataagcagatcaccgccagctccagctataagacatggggcctgcacctgttcagctggaacccttcttacgccagactggacaagcagggcaacttcaatgcttgggtggccggcagctacggcaatgatcagtggctgcaagtggacctgggcagcagcaaagaagtgacaggcatcatcacccagggcgccagaaatttcggcagcgtgcagtttgtggccagctacaaagtggcctactccaacgacagcgccaactggaccgagtatcaggaccctagaaccggcagctccaagatcttccccggcaattgggacaaccacagccacaagaagaatctgttcgaaacccctatcctggccagatatgtgcgcattctgcccgtggcctggcacaacagaattgccctgagactggaactgctcggctgt

SEQ ID NO: 44 - protein, 971 aa, Artificial Sequence
  source: /note="Description of Artificial Sequence: Synthetic polypeptide"
LDICSKNPCHNGGLCEEISQEVRGDVFPSYTCTCLKGYAGNHCETKGSDAHKSEVAHRFKDLGEENFKALVLIAFAQYLQQSPFEDHVKLVNEVTEFAKTCVADESAENCDKSLHTLFGDKLCTVATLRETYGEMADCCAKQEPERNECFLQHKDDNPNLPRLVRPEVDVMCTAFHDNEETFLKKYLYEIARRHPYFYAPELLFFAKRYKAAFTECCQAADKAACLLPKLDELRDEGKASSAKQRLKCASLQKFGERAFKAWAVARLSQRFPKAEFAEVSKLVTDLTKVHTECCHGDLLECADDRADLAKYICENQDSISSKLKECCEKPLLEKSHCIAEVENDEMPADLPSLAADFVESKDVCKNYAEAKDVFLGMFLYEYARRHPDYSVVLLLRLAKTYETTLEKCCAAADPHECYAKVFDEFKPLVEEPQNLIKQNCELFEQLGEYKFQNALLVRYTKKVPQVSTPTLVEVSRNLGKVGSKCCKHPEAKRMPCAEDYLSVVLNQLCVLHEKTPVSDRVTKCCTESLVNRRPCFSALEVDETYVPKEFNAETFTFHADICTLSEKERQIKKQTALVELVKHKPKATKEQLKAVMDDFAAFVEKCCKADDKETCFAEEGKKLVAASQAALGLGGSGGSGGSGGSCVEPLGMENGNIANSQIAASSVRVTFLGLQHWVPELARLNRAGMVNAWTPSSNDDNPWIQVNLLRRMWVTGVVTQGASRLASHEYLKAFKVAYSLNGHEFDFIHDVNKKHKEFVGNWNKNAVHVNLFETPVEAQYVRLYPTSCHTACTLRFELLGCELNGCANPLGLKNNSIPDKQITASSSYKTWGLHLFSWNPSYARLDKQGNFNAWVAGSYGNDQWLQVDLGSSKEVTGIITQGARNFGSVQFVASYKVAYSNDSANWTEYQDPRTGSSKIFPGNWDNHSHKKNLFETPILARYVRILPVAWHNRIALRLELLGCGSHHHHHH

SEQ ID NO: 45 - DNA, 2913 bp, Artificial Sequence
  source: /note="Description of Artificial Sequence: Synthetic polynucleotide"
ctggacatctgcagcaagaatccttgccacaacggcggcctgtgcgaagagatttctcaagaagtgcggggcgacgttttccccagctacacctgtacatgtctgaagggctacgccggcaaccactgcgagacaaaaggatccgatgctcacaagagcgaggtggcccacagattcaaggatctgggcgaagagaacttcaaggccctggtgctgatcgccttcgctcagtatctccagcagagccctttcgaggaccacgtgaagctggtcaacgaagtgaccgagttcgccaagacctgtgtggccgatgagagcgccgagaactgtgataagagcctgcacaccctgttcggcgacaagctgtgtacagtggccacactgagagaaacctacggcgagatggccgactgctgtgccaagcaagagcccgagagaaacgagtgcttcctgcagcacaaggacgacaaccccaacctgcctagactcgtgcgacccgaagtggatgtgatgtgcaccgcctttcacgacaacgaggaaaccttcctgaagaagtacctgtacgagatcgccagacggcacccctacttttatgcccctgagctgctgttcttcgccaagcggtataaggccgccttcaccgaatgttgccaggccgctgataaggctgcctgtctgctgcctaagctggacgagctgagagatgagggcaaagccagctctgccaagcagagactgaagtgcgccagcctgcagaagttcggcgagagagcttttaaggcctgggccgttgccagactgagccagagatttcctaaggccgagtttgccgaggtgtccaagctcgtgaccgatctgacaaaggtgcacaccgagtgctgtcacggcgatctgctggaatgtgccgacgatagagccgacctggccaagtacatctgcgagaaccaggacagcatcagcagcaagctgaaagagtgctgcgagaagcccctgctggaaaagtctcactgtatcgccgaggtggaaaacgacgagatgcctgccgatctgcctagcctggctgccgatttcgtggaaagcaaggacgtgtgcaagaactacgccgaggccaaggatgtgtttctgggcatgtttctgtatgagtacgcccgcagacaccccgactattctgtggttctgctgctgcggctggccaaaacctacgagacaaccctggaaaaatgctgcgccgctgccgatcctcacgagtgttatgccaaggtgttcgacgagttcaagcctctggtggaagaaccccagaacctgatcaagcagaactgcgagctgttcgagcagctgggcgagtacaagttccagaatgccctgctcgtgcggtacaccaagaaagtgcctcaggtgtccacacctacactggttgaggtgtcccggaatctgggcaaagtgggcagcaagtgttgcaagcaccctgaggccaagagaatgccttgcgccgaggattacctgagcgtggtgctgaatcagctgtgcgtgctgcacgagaaaacccctgtgtccgacagagtgaccaagtgctgtaccgagagcctcgtgaacagaaggccttgctttagcgccctggaagtggacgagacatacgtgcccaaagagttcaacgccgagacattcaccttccacgccgacatctgtaccctgagcgagaaagagcggcagatcaagaagcagacagccctggtcgagctggttaagcacaagcccaaggccaccaaagaacagctgaaggccgtgatggacgacttcgccgcctttgtcgagaagtgctgcaaggccgacgacaaagagacatgcttcgccgaagagggcaagaaactggtggctgcctctcaggctgctctcggacttggaggaagcggaggatctggcggttccggaggctcttgtgtggaacccctcggcatggaaaacggcaatatcgccaatagccagattgccgccagcagcgtcagagtgacatttctgggactgcagcactgggtgcccgagctggctagactgaatagagccggcatggtcaacgcctggacacccagcagcaacgacgataacccttggattcaagtgaacctgctgcggcgtatgtgggtcacaggtgttgttacacagggcgcctctagactggccagccacgagtatctgaaggcctttaaggtggcctacagcctgaacggccacgagttcgacttcatccacgacgtgaacaagaagcacaaagagtttgtcggcaactggaacaagaacgccgtgcacgtgaacctgttcgagacacctgtggaagcccagtacgtgcggctgtaccctacaagctgtcacaccgcctgcactctgagattcgaactgctgggatgcgagctgaacggctgtgctaatcctctgggcctgaagaacaacagcatccccgataagcagatcaccgccagctccagctataagacatggggcctgcacctgttcagctggaacccttcttacgccagactggacaagcagggcaacttcaatgcttgggtggccggcagctacggcaatgatcagtggctgcaagtggacctgggcagcagcaaagaagtgacaggcatcatcacccagggcgccagaaatttcggcagcgtgcagtttgtggccagctacaaagtggcctactccaacgacagcgccaactggaccgagtatcaggaccctagaaccggcagctccaagatcttccccggcaattgggacaaccacagccacaagaagaatctgttcgaaacccctatcctggccagatatgtgcgcattctgcccgtggcctggcacaacagaattgccctgagactggaactgctcggctgtggctctcaccaccaccatcaccat

SEQ ID NO: 46 - protein, 947 aa, Artificial Sequence
  source: /note="Description of Artificial Sequence: Synthetic polypeptide"
LDICSKNPCHNGGLCEEISQEVRGDVFPSYTCTCLKGYAGNHCETKDAHKSEVAHRFKDLGEENFKALVLIAFAQYLQQSPFEDHVKLVNEVTEFAKTCVADESAENCDKSLHTLFGDKLCTVATLRETYGEMADCCAKQEPERNECFLQHKDDNPNLPRLVRPEVDVMCTAFHDNEETFLKKYLYEIARRHPYFYAPELLFFAKRYKAAFTECCQAADKAACLLPKLDELRDEGKASSAKQRLKCASLQKFGERAFKAWAVARLSQRFPKAEFAEVSKLVTDLTKVHTECCHGDLLECADDRADLAKYICENQDSISSKLKECCEKPLLEKSHCIAEVENDEMPADLPSLAADFVESKDVCKNYAEAKDVFLGMFLYEYARRHPDYSVVLLLRLAKTYETTLEKCCAAADPHECYAKVFDEFKPLVEEPQNLIKQNCELFEQLGEYKFQNALLVRYTKKVPQVSTPTLVEVSRNLGKVGSKCCKHPEAKRMPCAEDYLSVVLNQLCVLHEKTPVSDRVTKCCTESLVNRRPCFSALEVDETYVPKEFNAETFTFHADICTLSEKERQIKKQTALVELVKHKPKATKEQLKAVMDDFAAFVEKCCKADDKETCFAEEGKKLVAASQAALCVEPLGMENGNIANSQIAASSVRVTFLGLQHWVPELARLNRAGMVNAWTPSSNDDNPWIQVNLLRRMWVTGVVTQGASRLASHEYLKAFKVAYSLNGHEFDFIHDVNKKHKEFVGNWNKNAVHVNLFETPVEAQYVRLYPTSCHTACTLRFELLGCELNGCANPLGLKNNSIPDKQITASSSYKTWGLHLFSWNPSYARLDKQGNFNAWVAGSYGNDQWLQVDLGSSKEVTGIITQGARNFGSVQFVASYKVAYSNDSANWTEYQDPRTGSSKIFPGNWDNHSHKKNLFETPILARYVRILPVAWHNRIALRLELLGC

SEQ ID NO: 47 - DNA, 2841 bp, Artificial Sequence
  source: /note="Description of Artificial Sequence: Synthetic polynucleotide"
ctggacatctgtagcaagaacccttgccacaacggcggcctgtgcgaagagatttctcaagaagtgcggggcgacgttttccccagctacacctgtacatgtctgaagggctacgccggcaaccactgcgagacaaaggatgcccacaagagcgaggtggcccacagattcaaggatctgggcgaagagaacttcaaggccctggtgctgatcgccttcgctcagtatctccagcagagccctttcgaggaccacgtgaagctggtcaacgaagtgaccgagttcgccaagacctgtgtggccgatgagagcgccgagaactgtgataagagcctgcacaccctgttcggcgacaagctgtgtacagtggccacactgagagaaacctacggcgagatggccgactgctgtgccaagcaagagcccgagagaaacgagtgcttcctccagcacaaggacgacaaccccaacctgcctagactcgtgcgacccgaagtggatgtgatgtgcaccgcctttcacgacaacgaggaaaccttcctgaagaagtacctgtacgagatcgccagacggcacccctacttttatgcccctgagctgctgttcttcgccaagcggtataaggccgccttcaccgaatgttgccaggccgctgataaggctgcctgtctgctgcctaagctggacgagctgagagatgagggcaaagccagctctgccaagcagagactgaaatgcgccagcctccagaagttcggcgagagagcttttaaggcctgggccgttgccagactgagccagagatttcctaaggccgagtttgccgaggtgtccaagctcgtgaccgatctgacaaaggtgcacaccgagtgctgtcacggcgatctgctggaatgtgccgacgatagagccgacctggccaagtacatctgcgagaaccaggacagcatcagcagcaagctgaaagagtgctgcgagaagcccctgctggaaaagtctcactgtatcgccgaggtggaaaacgacgagatgcctgccgatctgcctagcctggctgccgatttcgtggaaagcaaggacgtgtgcaagaactacgccgaggccaaggatgtgtttctgggcatgtttctgtatgagtacgcccgcagacaccccgactattctgtggttctgctgctgcggctggccaaaacctacgagacaaccctggaaaaatgctgcgccgctgccgatcctcacgagtgttatgccaaggtgttcgacgagttcaagcctctggtggaagaaccccagaacctgatcaagcagaactgcgagctgttcgagcagctgggcgagtacaagttccagaatgccctgctcgtgcggtacaccaagaaagtgcctcaggtgtccacacctacactggttgaggtgtcccggaatctgggcaaagtgggcagcaagtgttgcaagcaccctgaggccaagagaatgccttgcgccgaggattacctgagcgtggtgctgaatcagctgtgcgtgctgcacgagaaaacccctgtgtccgacagagtgaccaagtgctgtaccgagagcctcgtgaacagaaggccttgctttagcgccctggaagtggacgagacatacgtgcccaaagagttcaacgccgagacattcaccttccacgccgacatctgcaccctgtccgagaaagagcggcagatcaagaagcagacagccctggtcgagctggttaagcacaagcccaaggccaccaaagaacagctgaaggccgtgatggacgacttcgccgcctttgtcgagaagtgctgcaaggccgacgacaaagagacatgcttcgccgaagagggcaagaaactggtggctgcttctcaggccgctctgtgtgtggaacccctcggcatggaaaacggcaatatcgccaatagccagattgccgccagcagcgtcagagtgacatttctgggactgcaacactgggtgcccgagctggctagactgaatagagccggcatggtcaacgcctggacacccagcagcaacgacgataatccctggattcaagtgaacctgctgcggcgtatgtgggtcacaggtgttgttacacagggcgcaagcagactggccagccacgagtatctgaaggcctttaaggtggcctacagcctgaacggccacgagttcgacttcatccacgacgtgaacaagaagcacaaagagtttgtcggcaactggaacaagaacgccgtgcacgtgaacctgttcgagacacctgtggaagcccagtacgtgcggctgtaccctacaagctgtcacaccgcctgcactctgagattcgaactgctgggatgcgagctgaacggctgtgctaatcctctgggcctgaagaacaacagcatccccgataagcagatcaccgccagctccagctataagacatggggcctgcacctgttcagctggaacccttcttacgccagactggacaagcagggcaacttcaatgcttgggtggccggcagctacggcaatgatcagtggctgcaagtggacctgggcagcagcaaagaagtgacaggcatcatcacccaaggggccagaaatttcggcagcgtgcagttcgtggccagctacaaagtggcctactccaacgacagcgccaactggaccgagtatcaggaccctagaaccggcagctccaagatcttccccggcaattgggacaaccacagccacaagaagaatctgttcgaaacccctatcctggccagatatgtgcgcattctgcccgtggcctggcacaacagaattgccctgagactggaactgctcggctgc

SEQ ID NO: 48 - protein, 941 aa, Artificial Sequence
  source: /note="Description of Artificial Sequence: Synthetic polypeptide"
LDICSKNPCHNGGLCEEISQEVRGDVFPSYTCTCLKGYAGNHCETKDAHKSEVAHRFKDLGEENFKALVLIAFAQYLQQSPFEDHVKLVNEVTEFAKTCVADESAENCDKSLHTLFGDKLCTVATLRETYGEMADCCAKQEPERNECFLQHKDDNPNLPRLVRPEVDVMCTAFHDNEETFLKKYLYEIARRHPYFYAPELLFFAKRYKAAFTECCQAADKAACLLPKLDELRDEGKASSAKQRLKCASLQKFGERAFKAWAVARLSQRFPKAEFAEVSKLVTDLTKVHTECCHGDLLECADDRADLAKYICENQDSISSKLKECCEKPLLEKSHCIAEVENDEMPADLPSLAADFVESKDVCKNYAEAKDVFLGMFLYEYARRHPDYSVVLLLRLAKTYETTLEKCCAAADPHECYAKVFDEFKPLVEEPQNLIKQNCELFEQLGEYKFQNALLVRYTKKVPQVSTPTLVEVSRNLGKVGSKCCKHPEAKRMPCAEDYLSVVLNQLCVLHEKTPVSDRVTKCCTESLVNRRPCFSALEVDETYVPKEFNAETFTFHADICTLSEKERQIKKQTALVELVKHKPKATKEQLKAVMDDFAAFVEKCCKADDKETCFAEEGKKLVACVEPLGMENGNIANSQIAASSVRVTFLGLQHWVPELARLNRAGMVNAWTPSSNDDNPWIQVNLLRRMWVTGVVTQGASRLASHEYLKAFKVAYSLNGHEFDFIHDVNKKHKEFVGNWNKNAVHVNLFETPVEAQYVRLYPTSCHTACTLRFELLGCELNGCANPLGLKNNSIPDKQITASSSYKTWGLHLFSWNPSYARLDKQGNFNAWVAGSYGNDQWLQVDLGSSKEVTGIITQGARNFGSVQFVASYKVAYSNDSANWTEYQDPRTGSSKIFPGNWDNHSHKKNLFETPILARYVRILPVAWHNRIALRLELLGC

SEQ ID NO: 49 - DNA, 2823 bp, Artificial Sequence
  source: /note="Description of Artificial Sequence: Synthetic polynucleotide"
ctggacatctgtagcaagaacccttgccacaacggcggcctgtgcgaagagatttctcaagaagtgcggggcgacgttttccccagctacacctgtacatgtctgaagggctacgccggcaaccactgcgagacaaaggatgcccacaagagcgaggtggcccacagattcaaggatctgggcgaagagaacttcaaggccctggtgctgatcgccttcgctcagtatctccagcagagccctttcgaggaccacgtgaagctggtcaacgaagtgaccgagttcgccaagacctgtgtggccgatgagagcgccgagaactgtgataagagcctgcacaccctgttcggcgacaagctgtgtacagtggccacactgagagaaacctacggcgagatggccgactgctgtgccaagcaagagcccgagagaaacgagtgcttcctccagcacaaggacgacaaccccaacctgcctagactcgtgcgacccgaagtggatgtgatgtgcaccgcctttcacgacaacgaggaaaccttcctgaagaagtacctgtacgagatcgccagacggcacccctacttttatgcccctgagctgctgttcttcgccaagcggtataaggccgccttcaccgaatgttgccaggccgctgataaggctgcctgtctgctgcctaagctggacgagctgagagatgagggcaaagccagctctgccaagcagagactgaaatgcgccagcctccagaagttcggcgagagagcttttaaggcctgggccgttgccagactgagccagagatttcctaaggccgagtttgccgaggtgtccaagctcgtgaccgatctgacaaaggtgcacaccgagtgctgtcacggcgatctgctggaatgtgccgacgatagagccgacctggccaagtacatctgcgagaaccaggacagcatcagcagcaagctgaaagagtgctgcgagaagcccctgctggaaaagtctcactgtatcgccgaggtggaaaacgacgagatgcctgccgatctgcctagcctggctgccgatttcgtggaaagcaaggacgtgtgcaagaactacgccgaggccaaggatgtgtttctgggcatgtttctgtatgagtacgcccgcagacaccccgactattctgtggttctgctgctgcggctggccaaaacctacgagacaaccctggaaaaatgctgcgccgctgccgatcctcacgagtgttatgccaaggtgttcgacgagttcaagcctctggtggaagaaccccagaacctgatcaagcagaactgcgagctgttcgagcagctgggcgagtacaagttccagaatgccctgctcgtgcggtacaccaagaaagtgcctcaggtgtccacacctacactggttgaggtgtcccggaatctgggcaaagtgggcagcaagtgttgcaagcaccctgaggccaagagaatgccttgcgccgaggattacctgagcgtggtgctgaatcagctgtgcgtgctgcacgagaaaacccctgtgtccgacagagtgaccaagtgctgtaccgagagcctcgtgaacagaaggccttgctttagcgccctggaagtggacgagacatacgtgcccaaagagttcaacgccgagacattcaccttccacgccgacatctgcaccctgtccgagaaagagcggcagatcaagaagcagacagccctggtcgagctggttaagcacaagcccaaggccaccaaagaacagctgaaggccgtgatggacgacttcgccgcctttgtcgagaagtgctgcaaggccgacgacaaagagacatgcttcgccgaagagggcaagaaactggtggcctgtgtggaacccctcggcatggaaaacggcaatatcgccaatagccagattgccgccagcagcgtcagagtgacatttctgggactgcaacactgggtgcccgagctggctagactgaatagagccggcatggtcaacgcctggacacccagcagcaacgacgataatccctggattcaagtgaacctgctgcggcgtatgtgggtcacaggtgttgttacacagggcgcaagcagactggccagccacgagtatctgaaggcctttaaggtggcctacagcctgaacggccacgagttcgacttcatccacgacgtgaacaagaagcacaaagagtttgtcggcaactggaacaagaacgccgtgcacgtgaacctgttcgagacacctgtggaagcccagtacgtgcggctgtaccctacaagctgtcacaccgcctgcactctgagattcgaactgctgggatgcgagctgaacggctgtgctaatcctctgggcctgaagaacaacagcatccccgataagcagatcaccgccagctccagctataagacatggggcctgcacctgttcagctggaacccttcttacgccagactggacaagcagggcaacttcaatgcttgggtggccggcagctacggcaatgatcagtggctgcaagtggacctgggcagcagcaaagaagtgacaggcatcatcacccaaggggccagaaatttcggcagcgtgcagttcgtggccagctacaaagtggcctactccaacgacagcgccaactggaccgagtatcaggaccctagaaccggcagctccaagatcttccccggcaattgggacaaccacagccacaagaagaatctgttcgaaacccctatcctggccagatatgtgcgcattctgcccgtggcctggcacaacagaattgccctgagactggaactgctcggctgc

SEQ ID NO: 50 - protein, 963 aa, Artificial Sequence
  source: /note="Description of Artificial Sequence: Synthetic polypeptide"
LDICSKNPCHNGGLCEEISQEVRGDVFPSYTCTCLKGYAGNHCETKGSDAHKSEVAHRFKDLGEENFKALVLIAFAQYLQQSPFEDHVKLVNEVTEFAKTCVADESAENCDKSLHTLFGDKLCTVATLRETYGEMADCCAKQEPERNECFLQHKDDNPNLPRLVRPEVDVMCTAFHDNEETFLKKYLYEIARRHPYFYAPELLFFAKRYKAAFTECCQAADKAACLLPKLDELRDEGKASSAKQRLKCASLQKFGERAFKAWAVARLSQRFPKAEFAEVSKLVTDLTKVHTECCHGDLLECADDRADLAKYICENQDSISSKLKECCEKPLLEKSHCIAEVENDEMPADLPSLAADFVESKDVCKNYAEAKDVFLGMFLYEYARRHPDYSVVLLLRLAKTYETTLEKCCAAADPHECYAKVFDEFKPLVEEPQNLIKQNCELFEQLGEYKFQNALLVRYTKKVPQVSTPTLVEVSRNLGKVGSKCCKHPEAKRMPCAEDYLSVVLNQLCVLHEKTPVSDRVTKCCTESLVNRRPCFSALEVDETYVPKEFNAETFTFHADICTLSEKERQIKKQTALVELVKHKPKATKEQLKAVMDDFAAFVEKCCKADDKETCFAEEGKKLVAASQAALGVGGSGGSGGSGGSCVEPLGMENGNIANSQIAASSVRVTFLGLQHWVPELARLNRAGMVNAWTPSSNDDNPWIQVNLLRRMWVTGVVTQGASRLASHEYLKAFKVAYSLNGHEFDFIHDVNKKHKEFVGNWNKNAVHVNLFETPVEAQYVRLYPTSCHTACTLRFELLGCELNGCANPLGLKNNSIPDKQITASSSYKTWGLHLFSWNPSYARLDKQGNFNAWVAGSYGNDQWLQVDLGSSKEVTGIITQGARNFGSVQFVASYKVAYSNDSANWTEYQDPRTGSSKIFPGNWDNHSHKKNLFETPILARYVRILPVAWHNRIALRLELLGC

SEQ ID NO: 51 - DNA, 2889 bp, Artificial Sequence
  source: /note="Description of Artificial Sequence: Synthetic polynucleotide"
ctggacatctgcagcaagaatccttgccacaacggcggcctgtgcgaagagatttctcaagaagtgcggggcgacgttttccccagctacacctgtacatgtctgaagggctacgccggcaaccactgcgagacaaaaggatccgatgctcacaagagcgaggtggcccacagattcaaggatctgggcgaagagaacttcaaggccctggtgctgatcgccttcgctcagtatctccagcagagccctttcgaggaccacgtgaagctggtcaacgaagtgaccgagttcgccaagacctgtgtggccgatgagagcgccgagaactgtgataagagcctgcacaccctgttcggcgacaagctgtgtacagtggccacactgagagaaacctacggcgagatggccgactgctgtgccaagcaagagcccgagagaaacgagtgcttcctgcagcacaaggacgacaaccccaacctgcctagactcgtgcgacccgaagtggatgtgatgtgcaccgcctttcacgacaacgaggaaaccttcctgaagaagtacctgtacgagatcgccagacggcacccctacttttatgcccctgagctgctgttcttcgccaagcggtataaggccgccttcaccgaatgttgccaggccgctgataaggctgcctgtctgctgcctaagctggacgagctgagagatgagggcaaagccagctctgccaagcagagactgaagtgcgccagcctgcagaagttcggcgagagagcttttaaggcctgggccgttgccagactgagccagagatttcctaaggccgagtttgccgaggtgtccaagctcgtgaccgatctgacaaaggtgcacaccgagtgctgtcacggcgatctgctggaatgtgccgacgatagagccgacctggccaagtacatctgcgagaaccaggacagcatcagcagcaagctgaaagagtgctgcgagaagcccctgctggaaaagtctcactgtatcgccgaggtggaaaacgacgagatgcctgccgatctgcctagcctggctgccgatttcgtggaaagcaaggacgtgtgcaagaactacgccgaggccaaggatgtgtttctgggcatgtttctgtatgagtacgcccgcagacaccccgactattctgtggttctgctgctgcggctggccaaaacctacgagacaaccctggaaaaatgctgcgccgctgccgatcctcacgagtgttatgccaaggtgttcgacgagttcaagcctctggtggaagaaccccagaacctgatcaagcagaactgcgagctgttcgagcagctgggcgagtacaagttccagaatgccctgctcgtgcggtacaccaagaaagtgcctcaggtgtccacacctacactggttgaggtgtcccggaatctgggcaaagtgggcagcaagtgttgcaagcaccctgaggccaagagaatgccttgcgccgaggattacctgagcgtggtgctgaatcagctgtgcgtgctgcacgagaaaacccctgtgtccgacagagtgaccaagtgctgtaccgagagcctcgtgaacagaaggccttgctttagcgccctggaagtggacgagacatacgtgcccaaagagttcaacgccgagacattcaccttccacgccgacatctgtaccctgagcgagaaagagcggcagatcaagaagcagacagccctggtcgagctggttaagcacaagcccaaggccaccaaagaacagctgaaggccgtgatggacgacttcgccgcctttgtcgagaagtgctgcaaggccgacgacaaagagacatgcttcgccgaagagggcaagaaactggtggctgcctctcaggctgctctcggagtgggaggaagcggaggatctggcggttccggaggctcttgtgtggaacccctcggcatggaaaacggcaatatcgccaatagccagattgccgccagcagcgtcagagtgacatttctgggactgcagcactgggtgcccgagctggctagactgaatagagccggcatggtcaacgcctggacacccagcagcaacgacgataacccttggattcaagtgaacctgctgcggcgtatgtgggtcacaggtgttgttacacagggcgcctctagactggccagccacgagtatctgaaggcctttaaggtggcctacagcctgaacggccacgagttcgacttcatccacgacgtgaacaagaagcacaaagagtttgtcggcaactggaacaagaacgccgtgcacgtgaacctgttcgagacacctgtggaagcccagtacgtgcggctgtaccctacaagctgtcacaccgcctgcactctgagattcgaactgctgggatgcgagctgaacggctgtgctaatcctctgggcctgaagaacaacagcatccccgataagcagatcaccgccagctccagctataagacatggggcctgcacctgttcagctggaacccttcttacgccagactggacaagcagggcaacttcaatgcttgggtggccggcagctacggcaatgatcagtggctgcaagtggacctgggcagcagcaaagaagtgacaggcatcatcacccagggcgccagaaatttcggcagcgtgcagtttgtggccagctacaaagtggcctactccaacgacagcgccaactggaccgagtatcaggaccctagaaccggcagctccaagatcttccccggcaattgggacaaccacagccacaagaagaatctgttcgaaacccctatcctggccagatatgtgcgcattctgcccgtggcctggcacaacagaattgccctgagactggaactgctcggctgt

SEQ ID NO: 52 - protein, 961 aa, Artificial Sequence
  source: /note="Description of Artificial Sequence: Synthetic polypeptide"
LDICSKNPCHNGGLCEEISQEVRGDVFPSYTCTCLKGYAGNHCETKGSDAHKSEVAHRFKDLGEENFKALVLIAFAQYLQQSPFEDHVKLVNEVTEFAKTCVADESAENCDKSLHTLFGDKLCTVATLRETYGEMADCCAKQEPERNECFLQHKDDNPNLPRLVRPEVDVMCTAFHDNEETFLKKYLYEIARRHPYFYAPELLFFAKRYKAAFTECCQAADKAACLLPKLDELRDEGKASSAKQRLKCASLQKFGERAFKAWAVARLSQRFPKAEFAEVSKLVTDLTKVHTECCHGDLLECADDRADLAKYICENQDSISSKLKECCEKPLLEKSHCIAEVENDEMPADLPSLAADFVESKDVCKNYAEAKDVFLGMFLYEYARRHPDYSVVLLLRLAKTYETTLEKCCAAADPHECYAKVFDEFKPLVEEPQNLIKQNCELFEQLGEYKFQNALLVRYTKKVPQVSTPTLVEVSRNLGKVGSKCCKHPEAKRMPCAEDYLSVVLNQLCVLHEKTPVSDRVTKCCTESLVNRRPCFSALEVDETYVPKEFNAETFTFHADICTLSEKERQIKKQTALVELVKHKPKATKEQLKAVMDDFAAFVEKCCKADDKETCFAEEGKKLVAASQAALGGSGGSGGSGGSCVEPLGMENGNIANSQIAASSVRVTFLGLQHWVPELARLNRAGMVNAWTPSSNDDNPWIQVNLLRRMWVTGVVTQGASRLASHEYLKAFKVAYSLNGHEFDFIHDVNKKHKEFVGNWNKNAVHVNLFETPVEAQYVRLYPTSCHTACTLRFELLGCELNGCANPLGLKNNSIPDKQITASSSYKTWGLHLFSWNPSYARLDKQGNFNAWVAGSYGNDQWLQVDLGSSKEVTGIITQGARNFGSVQFVASYKVAYSNDSANWTEYQDPRTGSSKIFPGNWDNHSHKKNLFETPILARYVRILPVAWHNRIALRLELLGC

SEQ ID NO: 53 - DNA, 2883 bp, Artificial Sequence
  source: /note="Description of Artificial Sequence: Synthetic polynucleotide"
ctggacatctgcagcaagaatccttgccacaacggcggcctgtgcgaagagatttctcaagaagtgcggggcgacgttttccccagctacacctgtacatgtctgaagggctacgccggcaaccactgcgagacaaaaggatccgatgctcacaagagcgaggtggcccacagattcaaggatctgggcgaagagaacttcaaggccctggtgctgatcgccttcgctcagtatctccagcagagccctttcgaggaccacgtgaagctggtcaacgaagtgaccgagttcgccaagacctgtgtggccgatgagagcgccgagaactgtgataagagcctgcacaccctgttcggcgacaagctgtgtacagtggccacactgagagaaacctacggcgagatggccgactgctgtgccaagcaagagcccgagagaaacgagtgcttcctgcagcacaaggacgacaaccccaacctgcctagactcgtgcgacccgaagtggatgtgatgtgcaccgcctttcacgacaacgaggaaaccttcctgaagaagtacctgtacgagatcgccagacggcacccctacttttatgcccctgagctgctgttcttcgccaagcggtataaggccgccttcaccgaatgttgccaggccgctgataaggctgcctgtctgctgcctaagctggacgagctgagagatgagggcaaagccagctctgccaagcagagactgaagtgcgccagcctgcagaagttcggcgagagagcttttaaggcctgggccgttgccagactgagccagagatttcctaaggccgagtttgccgaggtgtccaagctcgtgaccgatctgacaaaggtgcacaccgagtgctgtcacggcgatctgctggaatgtgccgacgatagagccgacctggccaagtacatctgcgagaaccaggacagcatcagcagcaagctgaaagagtgctgcgagaagcccctgctggaaaagtctcactgtatcgccgaggtggaaaacgacgagatgcctgccgatctgcctagcctggctgccgatttcgtggaaagcaaggacgtgtgcaagaactacgccgaggccaaggatgtgtttctgggcatgtttctgtatgagtacgcccgcagacaccccgactattctgtggttctgctgctgcggctggccaaaacctacgagacaaccctggaaaaatgctgcgccgctgccgatcctcacgagtgttatgccaaggtgttcgacgagttcaagcctctggtggaagaaccccagaacctgatcaagcagaactgcgagctgttcgagcagctgggcgagtacaagttccagaatgccctgctcgtgcggtacaccaagaaagtgcctcaggtgtccacacctacactggttgaggtgtcccggaatctgggcaaagtgggcagcaagtgttgcaagcaccctgaggccaagagaatgccttgcgccgaggattacctgagcgtggtgctgaatcagctgtgcgtgctgcacgagaaaacccctgtgtccgacagagtgaccaagtgctgtaccgagagcctcgtgaacagaaggccttgctttagcgccctggaagtggacgagacatacgtgcccaaagagttcaacgccgagacattcaccttccacgccgacatctgtaccctgagcgagaaagagcggcagatcaagaagcagacagccctggtcgagctggttaagcacaagcccaaggccaccaaagaacagctgaaggccgtgatggacgacttcgccgcctttgtcgagaagtgctgcaaggccgacgacaaagagacatgcttcgccgaagagggcaagaaactggtggctgcctctcaggctgctctcggaggaagcggaggatctggcggttccggaggctcttgtgtggaacccctcggcatggaaaacggcaatatcgccaatagccagattgccgccagcagcgtcagagtgacatttctgggactgcagcactgggtgcccgagctggctagactgaatagagccggcatggtcaacgcctggacacccagcagcaacgacgataacccttggattcaagtgaacctgctgcggcgtatgtgggtcacaggtgttgttacacagggcgcctctagactggccagccacgagtatctgaaggcctttaaggtggcctacagcctgaacggccacgagttcgacttcatccacgacgtgaacaagaagcacaaagagtttgtcggcaactggaacaagaacgccgtgcacgtgaacctgttcgagacacctgtggaagcccagtacgtgcggctgtaccctacaagctgtcacaccgcctgcactctgagattcgaactgctgggatgcgagctgaacggctgtgctaatcctctgggcctgaagaacaacagcatccccgataagcagatcaccgccagctccagctataagacatggggcctgcacctgttcagctggaacccttcttacgccagactggacaagcagggcaacttcaatgcttgggtggccggcagctacggcaatgatcagtggctgcaagtggacctgggcagcagcaaagaagtgacaggcatcatcacccagggcgccagaaatttcggcagcgtgcagtttgtggccagctacaaagtggcctactccaacgacagcgccaactggaccgagtatcaggaccctagaaccggcagctccaagatcttccccggcaattgggacaaccacagccacaagaagaatctgttcgaaacccctatcctggccagatatgtgcgcattctgcccgtggcctggcacaacagaattgccctgagactggaactgctcggctgt

SEQ ID NO: 54 - protein, 954 aa, Artificial Sequence
  source: /note="Description of Artificial Sequence: Synthetic polypeptide"
LDICSKNPCHNGGLCEEISQEVRGDVFPSYTCTCLKGYAGNHCETKGSDAHKSEVAHRFKDLGEENFKALVLIAFAQYLQQSPFEDHVKLVNEVTEFAKTCVADESAENCDKSLHTLFGDKLCTVATLRETYGEMADCCAKQEPERNECFLQHKDDNPNLPRLVRPEVDVMCTAFHDNEETFLKKYLYEIARRHPYFYAPELLFFAKRYKAAFTECCQAADKAACLLPKLDELRDEGKASSAKQRLKCASLQKFGERAFKAWAVARLSQRFPKAEFAEVSKLVTDLTKVHTECCHGDLLECADDRADLAKYICENQDSISSKLKECCEKPLLEKSHCIAEVENDEMPADLPSLAADFVESKDVCKNYAEAKDVFLGMFLYEYARRHPDYSVVLLLRLAKTYETTLEKCCAAADPHECYAKVFDEFKPLVEEPQNLIKQNCELFEQLGEYKFQNALLVRYTKKVPQVSTPTLVEVSRNLGKVGSKCCKHPEAKRMPCAEDYLSVVLNQLCVLHEKTPVSDRVTKCCTESLVNRRPCFSALEVDETYVPKEFNAETFTFHADICTLSEKERQIKKQTALVELVKHKPKATKEQLKAVMDDFAAFVEKCCKADDKETCFAEEGKKLVAASQAALGGGGSCVEPLGMENGNIANSQIAASSVRVTFLGLQHWVPELARLNRAGMVNAWTPSSNDDNPWIQVNLLRRMWVTGVVTQGASRLASHEYLKAFKVAYSLNGHEFDFIHDVNKKHKEFVGNWNKNAVHVNLFETPVEAQYVRLYPTSCHTACTLRFELLGCELNGCANPLGLKNNSIPDKQITASSSYKTWGLHLFSWNPSYARLDKQGNFNAWVAGSYGNDQWLQVDLGSSKEVTGIITQGARNFGSVQFVASYKVAYSNDSANWTEYQDPRTGSSKIFPGNWDNHSHKKNLFETPILARYVRILPVAWHNRIALRLELLGC

SEQ ID NO: 55 - DNA, 2862 bp, Artificial Sequence
  source: /note="Description of Artificial Sequence: Synthetic polynucleotide"
ctggacatctgcagcaagaatccttgccacaacggcggcctgtgcgaagagatttctcaagaagtgcggggcgacgttttccccagctacacctgtacatgtctgaagggctacgccggcaaccactgcgagacaaaaggatccgatgctcacaagagcgaggtggcccacagattcaaggatctgggcgaagagaacttcaaggccctggtgctgatcgccttcgctcagtatctccagcagagccctttcgaggaccacgtgaagctggtcaacgaagtgaccgagttcgccaagacctgtgtggccgatgagagcgccgagaactgtgataagagcctgcacaccctgttcggcgacaagctgtgtacagtggccacactgagagaaacctacggcgagatggccgactgctgtgccaagcaagagcccgagagaaacgagtgcttcctgcagcacaaggacgacaaccccaacctgcctagactcgtgcgacccgaagtggatgtgatgtgcaccgcctttcacgacaacgaggaaaccttcctgaagaagtacctgtacgagatcgccagacggcacccctacttttatgcccctgagctgctgttcttcgccaagcggtataaggccgccttcaccgaatgttgccaggccgctgataaggctgcctgtctgctgcctaagctggacgagctgagagatgagggcaaagccagctctgccaagcagagactgaagtgcgccagcctgcagaagttcggcgagagagcttttaaggcctgggccgttgccagactgagccagagatttcctaaggccgagtttgccgaggtgtccaagctcgtgaccgatctgacaaaggtgcacaccgagtgctgtcacggcgatctgctggaatgtgccgacgatagagccgacctggccaagtacatctgcgagaaccaggacagcatcagcagcaagctgaaagagtgctgcgagaagcccctgctggaaaagtctcactgtatcgccgaggtggaaaacgacgagatgcctgccgatctgcctagcctggctgccgatttcgtggaaagcaaggacgtgtgcaagaactacgccgaggccaaggatgtgtttctgggcatgtttctgtatgagtacgcccgcagacaccccgactattctgtggttctgctgctgcggctggccaaaacctacgagacaaccctggaaaaatgctgcgccgctgccgatcctcacgagtgttatgccaaggtgttcgacgagttcaagcctctggtggaagaaccccagaacctgatcaagcagaactgcgagctgttcgagcagctgggcgagtacaagttccagaatgccctgctcgtgcggtacaccaagaaagtgcctcaggtgtccacacctacactggttgaggtgtcccggaatctgggcaaagtgggcagcaagtgttgcaagcaccctgaggccaagagaatgccttgcgccgaggattacctgagcgtggtgctgaatcagctgtgcgtgctgcacgagaaaacccctgtgtccgacagagtgaccaagtgctgtaccgagagcctcgtgaacagaaggccttgctttagcgccctggaagtggacgagacatacgtgcccaaagagttcaacgccgagacattcaccttccacgccgacatctgtaccctgagcgagaaagagcggcagatcaagaagcagacagccctggtcgagctggttaagcacaagcccaaggccaccaaagaacagctgaaggccgtgatggacgacttcgccgcctttgtcgagaagtgctgcaaggccgacgacaaagagacatgcttcgccgaagagggcaagaaactggtggctgcctctcaagctgctctcggaggcggaggatcttgtgtggaacccctcggcatggaaaacggcaatatcgccaatagccagattgccgccagcagcgtcagagtgacatttctgggactgcagcactgggtgcccgagctggctagactgaatagagccggcatggtcaacgcctggacacccagcagcaacgacgataacccttggattcaagtgaacctgctgcggcgtatgtgggtcacaggtgttgttacacagggcgcctctagactggccagccacgagtatctgaaggcctttaaggtggcctacagcctgaacggccacgagttcgacttcatccacgacgtgaacaagaagcacaaagagtttgtcggcaactggaacaagaacgccgtgcacgtgaacctgttcgagacacctgtggaagcccagtacgtgcggctgtaccctacaagctgtcacaccgcctgcactctgagattcgaactgctgggatgcgagctgaacggctgtgctaatcctctgggcctgaagaacaacagcatccccgataagcagatcaccgccagctccagctataagacatggggcctgcacctgttcagctggaacccttcttacgccagactggacaagcagggcaacttcaatgcttgggtggccggcagctacggcaatgatcagtggctgcaagtggacctgggcagcagcaaagaagtgacaggcatcatcacccagggcgccagaaatttcggcagcgtgcagtttgtggccagctacaaagtggcctactccaacgacagcgccaactggaccgagtatcaggaccctagaaccggcagctccaagatcttccccggcaattgggacaaccacagccacaagaagaatctgttcgaaacccctatcctggccagatatgtgcgcattctgcccgtggcctggcacaacagaattgccctgagactggaactgctcggctgc

SEQ ID NO: 56 - protein, 959 aa, Artificial Sequence
  source: /note="Description of Artificial Sequence: Synthetic polypeptide"
LDICSKNPCHNGGLCEEISQEVRGDVFPSYTCTCLKGYAGNHCETKGSDAHKSEVAHRFKDLGEENFKALVLIAFAQYLQQSPFEDHVKLVNEVTEFAKTCVADESAENCDKSLHTLFGDKLCTVATLRETYGEMADCCAKQEPERNECFLQHKDDNPNLPRLVRPEVDVMCTAFHDNEETFLKKYLYEIARRHPYFYAPELLFFAKRYKAAFTECCQAADKAACLLPKLDELRDEGKASSAKQRLKCASLQKFGERAFKAWAVARLSQRFPKAEFAEVSKLVTDLTKVHTECCHGDLLECADDRADLAKYICENQDSISSKLKECCEKPLLEKSHCIAEVENDEMPADLPSLAADFVESKDVCKNYAEAKDVFLGMFLYEYARRHPDYSVVLLLRLAKTYETTLEKCCAAADPHECYAKVFDEFKPLVEEPQNLIKQNCELFEQLGEYKFQNALLVRYTKKVPQVSTPTLVEVSRNLGKVGSKCCKHPEAKRMPCAEDYLSVVLNQLCVLHEKTPVSDRVTKCCTESLVNRRPCFSALEVDETYVPKEFNAETFTFHADICTLSEKERQIKKQTALVELVKHKPKATKEQLKAVMDDFAAFVEKCCKADDKETCFAEEGKKLVAASQAALGGGGSGGGGSCVEPLGMENGNIANSQIAASSVRVTFLGLQHWVPELARLNRAGMVNAWTPSSNDDNPWIQVNLLRRMWVTGVVTQGASRLASHEYLKAFKVAYSLNGHEFDFIHDVNKKHKEFVGNWNKNAVHVNLFETPVEAQYVRLYPTSCHTACTLRFELLGCELNGCANPLGLKNNSIPDKQITASSSYKTWGLHLFSWNPSYARLDKQGNFNAWVAGSYGNDQWLQVDLGSSKEVTGIITQGARNFGSVQFVASYKVAYSNDSANWTEYQDPRTGSSKIFPGNWDNHSHKKNLFETPILARYVRILPVAWHNRIALRLELLGC

SEQ ID NO: 57 - DNA, 2877 bp, Artificial Sequence
  source: /note="Description of Artificial Sequence: Synthetic polynucleotide"
ctggacatctgcagcaagaatccttgccacaacggcggcctgtgcgaagagatttctcaagaagtgcggggcgacgttttccccagctacacctgtacatgtctgaagggctacgccggcaaccactgcgagacaaaaggatccgatgctcacaagagcgaggtggcccacagattcaaggatctgggcgaagagaacttcaaggccctggtgctgatcgccttcgctcagtatctccagcagagccctttcgaggaccacgtgaagctggtcaacgaagtgaccgagttcgccaagacctgtgtggccgatgagagcgccgagaactgtgataagagcctgcacaccctgttcggcgacaagctgtgtacagtggccacactgagagaaacctacggcgagatggccgactgctgtgccaagcaagagcccgagagaaacgagtgcttcctgcagcacaaggacgacaaccccaacctgcctagactcgtgcgacccgaagtggatgtgatgtgcaccgcctttcacgacaacgaggaaaccttcctgaagaagtacctgtacgagatcgccagacggcacccctacttttatgcccctgagctgctgttcttcgccaagcggtataaggccgccttcaccgaatgttgccaggccgctgataaggctgcctgtctgctgcctaagctggacgagctgagagatgagggcaaagccagctctgccaagcagagactgaagtgcgccagcctgcagaagttcggcgagagagcttttaaggcctgggccgttgccagactgagccagagatttcctaaggccgagtttgccgaggtgtccaagctcgtgaccgatctgacaaaggtgcacaccgagtgctgtcacggcgatctgctggaatgtgccgacgatagagccgacctggccaagtacatctgcgagaaccaggacagcatcagcagcaagctgaaagagtgctgcgagaagcccctgctggaaaagtctcactgtatcgccgaggtggaaaacgacgagatgcctgccgatctgcctagcctggctgccgatttcgtggaaagcaaggacgtgtgcaagaactacgccgaggccaaggatgtgtttctgggcatgtttctgtatgagtacgcccgcagacaccccgactattctgtggttctgctgctgcggctggccaaaacctacgagacaaccctggaaaaatgctgcgccgctgccgatcctcacgagtgttatgccaaggtgttcgacgagttcaagcctctggtggaagaaccccagaacctgatcaagcagaactgcgagctgttcgagcagctgggcgagtacaagttccagaatgccctgctcgtgcggtacaccaagaaagtgcctcaggtgtccacacctacactggttgaggtgtcccggaatctgggcaaagtgggcagcaagtgttgcaagcaccctgaggccaagagaatgccttgcgccgaggattacctgagcgtggtgctgaatcagctgtgcgtgctgcacgagaaaacccctgtgtccgacagagtgaccaagtgctgtaccgagagcctcgtgaacagaaggccttgctttagcgccctggaagtggacgagacatacgtgcccaaagagttcaacgccgagacattcaccttccacgccgacatctgtaccctgagcgagaaagagcggcagatcaagaagcagacagccctggtcgagctggttaagcacaagcccaaggccaccaaagaacagctgaaggccgtgatggacgacttcgccgcctttgtcgagaagtgctgcaaggccgacgacaaagagacatgcttcgccgaagagggcaagaaactggtggctgcctctcaagctgctctcggaggcggaggctccggaggcggaggatcttgtgtggaacccctcggcatggaaaacggcaatatcgccaatagccagattgccgccagcagcgtcagagtgacatttctgggactgcagcactgggtgcccgagctggctagactgaatagagccggcatggtcaacgcctggacacccagcagcaacgacgataacccttggattcaagtgaacctgctgcggcgtatgtgggtcacaggtgttgttacacagggcgcctctagactggccagccacgagtatctgaaggcctttaaggtggcctacagcctgaacggccacgagttcgacttcatccacgacgtgaacaagaagcacaaagagtttgtcggcaactggaacaagaacgccgtgcacgtgaacctgttcgagacacctgtggaagcccagtacgtgcggctgtaccctacaagctgtcacaccgcctgcactctgagattcgaactgctgggatgcgagctgaacggctgtgctaatcctctgggcctgaagaacaacagcatccccgataagcagatcaccgccagctccagctataagacatggggcctgcacctgttcagctggaacccttcttacgccagactggacaagcagggcaacttcaatgcttgggtggccggcagctacggcaatgatcagtggctgcaagtggacctgggcagcagcaaagaagtgacaggcatcatcacccagggcgccagaaatttcggcagcgtgcagtttgtggccagctacaaagtggcctactccaacgacagcgccaactggaccgagtatcaggaccctagaaccggcagctccaagatcttccccggcaattgggacaaccacagccacaagaagaatctgttcgaaacccctatcctggccagatatgtgcgcattctgcccgtggcctggcacaacagaattgccctgagactggaactgctcggctgc

SEQ ID NO: 58 - protein, 949 aa, Artificial Sequence
  source: /note="Description of Artificial Sequence: Synthetic polypeptide"
LDICSKNPCHNGGLCEEISQEVRGDVFPSYTCTCLKGYAGNHCETKDAHKSEVAHRFKDLGEENFKALVLIAFAQYLQQSPFEDHVKLVNEVTEFAKTCVADESAENCDKSLHTLFGDKLCTVATLRETYGEMADCCAKQEPERNECFLQHKDDNPNLPRLVRPEVDVMCTAFHDNEETFLKKYLYEIARRHPYFYAPELLFFAKRYKAAFTECCQAADKAACLLPKLDELRDEGKASSAKQRLKCASLQKFGERAFKAWAVARLSQRFPKAEFAEVSKLVTDLTKVHTECCHGDLLECADDRADLAKYICENQDSISSKLKECCEKPLLEKSHCIAEVENDEMPADLPSLAADFVESKDVCKNYAEAKDVFLGMFLYEYARRHPDYSVVLLLRLAKTYETTLEKCCAAADPHECYAKVFDEFKPLVEEPQNLIKQNCELFEQLGEYKFQNALLVRYTKKVPQVSTPTLVEVSRNLGKVGSKCCKHPEAKRMPCAEDYLSVVLNQLCVLHEKTPVSDRVTKCCTESLVNRRPCFSALEVDETYVPKEFNAETFTFHADICTLSEKERQIKKQTALVELVKHKPKATKEQLKAVMDDFAAFVEKCCKADDKETCFAEEGKKLVAASQAALGLCVEPLGMENGNIANSQIAASSVRVTFLGLQHWVPELARLNRAGMVNAWTPSSNDDNPWIQVNLLRRMWVTGVVTQGASRLASHEYLKAFKVAYSLNGHEFDFIHDVNKKHKEFVGNWNKNAVHVNLFETPVEAQYVRLYPTSCHTACTLRFELLGCELNGCANPLGLKNNSIPDKQITASSSYKTWGLHLFSWNPSYARLDKQGNFNAWVAGSYGNDQWLQVDLGSSKEVTGIITQGARNFGSVQFVASYKVAYSNDSANWTEYQDPRTGSSKIFPGNWDNHSHKKNLFETPILARYVRILPVAWHNRIALRLELLGC

SEQ ID NO: 59 - DNA, 2847 bp, Artificial Sequence
  source: /note="Description of Artificial Sequence: Synthetic polynucleotide"
ctggacatctgcagcaagaatccttgccacaacggcggcctgtgcgaagagatttctcaagaagtgcggggcgacgttttccccagctacacctgtacatgtctgaagggctacgccggcaaccactgcgagacaaaggatgcccacaagagcgaggtggcccacagattcaaggatctgggcgaagagaacttcaaggccctggtgctgatcgccttcgctcagtatctccagcagagccctttcgaggaccacgtgaagctggtcaacgaagtgaccgagttcgccaagacctgtgtggccgatgagagcgccgagaactgtgataagagcctgcacaccctgttcggcgacaagctgtgtacagtggccacactgagagaaacctacggcgagatggccgactgctgtgccaagcaagagcccgagagaaacgagtgcttcctgcagcacaaggacgacaaccccaacctgcctagactcgtgcgacccgaagtggatgtgatgtgcaccgcctttcacgacaacgaggaaaccttcctgaagaagtacctgtacgagatcgccagacggcacccctacttttatgcccctgagctgctgttcttcgccaagcggtataaggccgccttcaccgaatgttgccaggccgctgataaggctgcctgtctgctgcctaagctggacgagctgagagatgagggcaaagccagctctgccaagcagagactgaagtgcgccagcctgcagaagttcggcgagagagcttttaaggcctgggccgttgccagactgagccagagatttcctaaggccgagtttgccgaggtgtccaagctcgtgaccgatctgacaaaggtgcacaccgagtgctgtcacggcgatctgctggaatgtgccgacgatagagccgacctggccaagtacatctgcgagaaccaggacagcatcagcagcaagctgaaagagtgctgcgagaagcccctgctggaaaagtctcactgtatcgccgaggtggaaaacgacgagatgcctgccgatctgcctagcctggctgccgatttcgtggaaagcaaggacgtgtgcaagaactacgccgaggccaaggatgtgtttctgggcatgtttctgtatgagtacgcccgcagacaccccgactattctgtggttctgctgctgcggctggccaaaacctacgagacaaccctggaaaaatgctgcgccgctgccgatcctcacgagtgttatgccaaggtgttcgacgagttcaagcctctggtggaagaaccccagaacctgatcaagcagaactgcgagctgttcgagcagctgggcgagtacaagttccagaatgccctgctcgtgcggtacaccaagaaagtgcctcaggtgtccacacctacactggttgaggtgtcccggaatctgggcaaagtgggcagcaagtgttgcaagcaccctgaggccaagagaatgccttgcgccgaggattacctgagcgtggtgctgaatcagctgtgcgtgctgcacgagaaaacccctgtgtccgacagagtgaccaagtgctgtaccgagagcctcgtgaacagaaggccttgctttagcgccctggaagtggacgagacatacgtgcccaaagagttcaacgccgagacattcaccttccacgccgacatctgtaccctgagcgagaaagagcggcagatcaagaagcagacagccctggtcgagctggttaagcacaagcccaaggccaccaaagaacagctgaaggccgtgatggacgacttcgccgcctttgtcgagaagtgctgcaaggccgacgacaaagagacatgcttcgccgaagagggcaagaaactggtggctgcttctcaggctgccctgggactgtgtgtggaacccctcggcatggaaaacggcaatatcgccaatagccagattgccgccagcagcgtcagagtgacatttctgggactgcagcactgggtgcccgagctggctagactgaatagagccggcatggtcaacgcctggacacccagcagcaacgacgataatccctggatccaagtgaacctgctgcggcgtatgtgggtcacaggtgttgttacacagggcgcctctagactggccagccacgagtatctgaaggcctttaaggtggcctacagcctgaacggccacgagttcgacttcatccacgacgtgaacaagaagcacaaagagtttgtcggcaactggaacaagaacgccgtgcacgtgaacctgttcgagacacctgtggaagcccagtacgtgcggctgtaccctacaagctgtcacaccgcctgcactctgagattcgaactgctgggatgcgagctgaacggctgtgctaatcctctgggcctgaagaacaacagcatccccgataagcagatcaccgccagctccagctataagacatggggcctgcacctgttcagctggaacccttcttacgccagactggacaagcagggcaacttcaatgcttgggtggccggcagctacggcaatgatcagtggctgcaagtggacctgggcagcagcaaagaagtgacaggcatcatcacccagggcgccagaaatttcggcagcgtgcagtttgtggccagctacaaagtggcctactccaacgacagcgccaactggaccgagtaccaggatcctagaaccggcagctccaagatcttccccggcaattgggacaaccacagccacaagaagaatctgttcgaaacccctatcctggccagatatgtgcggattctgcccgtggcctggcacaacagaattgccctgagactggaactgctcggctgt

SEQ ID NO: 60-61 - skipped (2 entries)

SEQ ID NO: 62 - protein, 12 aa, Artificial Sequence
  source: /note="Description of Artificial Sequence: Synthetic peptide"
GGSGGSGGSGGS

SEQ ID NO: 63 - protein, 8 aa, Artificial Sequence
  source: /note="Description of Artificial Sequence: Synthetic peptide"
GSGSGSGS

SEQ ID NO: 64 - protein, 5 aa, Artificial Sequence
  source: /note="Description of Artificial Sequence: Synthetic peptide"
GGGGS

SEQ ID NO: 65 - protein, 10 aa, Artificial Sequence
  source: /note="Description of Artificial Sequence: Synthetic peptide"
GGGGSGGGGS

SEQ ID NO: 66 - protein, 8 aa, Artificial Sequence
  source: /note="Description of Artificial Sequence: Synthetic peptide"
GSHHHHHH

SEQ ID NO: 67 - protein, 6 aa, Artificial Sequence
  source: /note="Description of Artificial Sequence: Synthetic 6xHis tag"
HHHHHH

SEQ ID NO: 68 - protein, 463 aa, Mus musculus
MQVSRVLAALCGMLLCASGLFAASGDFCDSSLCLNGGTCLTGQDNDIYCLCPEGFTGLVCNETERGPCSPNPCYNDAKCLVTLDTQRGDIFTEYICQCPVGYSGIHCETETNYYNLDGEYMFTTAVPNTAVPTPAPTPDLSNNLASRCSTQLGMEGGAIADSQISASSVYMGFMGLQRWGPELARLYRTGIVNAWTASNYDSKPWIQVNLLRKMRVSGVMTQGASRAGRAEYLKTFKVAYSLDGRKFEFIQDESGGDKEFLGNLDNNSLKVNMFNPTLEAQYIKLYPVSCHRGCTLRFELLGCELHGCSEPLGLKNNTIPDSQMSASSSYKTWNLRAFGWYPHLGRLDNQGKINAWTAQSNSAKEWLQVDLGTQRQVTGIITQGARDFGHIQYVASYKVAHSDDGVQWTVYEEQGSSKVFQGNLDNNSHKKNIFEKPFMARYVRVLPVSWHNRITLRLELLGC

SEQ ID NO: 69 - protein, 1030 aa, Artificial Sequence
  source: /note="Description of Artificial Sequence: Synthetic polypeptide"
DICDPNPCENGGICLPGLADGSFSCECPDGFTDPNCSSVVEVASDEEEPTSAGPCTPNPCHNGGTCEISEAYRGDTFIGYVCKCPRGFNGIHCQHNINECEVEPCKNGGICTDLVANYSCECPGEFMGRNCQYKDAHKSEVAHRFKDLGEENFKALVLIAFAQYLQQSPFEDHVKLVNEVTEFAKTCVADESAENCDKSLHTLFGDKLCTVATLRETYGEMADCCAKQEPERNECFLQHKDDNPNLPRLVRPEVDVMCTAFHDNEETFLKKYLYEIARRHPYFYAPELLFFAKRYKAAFTECCQAADKAACLLPKLDELRDEGKASSAKQRLKCASLQKFGERAFKAWAVARLSQRFPKAEFAEVSKLVTDLTKVHTECCHGDLLECADDRADLAKYICENQDSISSKLKECCEKPLLEKSHCIAEVENDEMPADLPSLAADFVESKDVCKNYAEAKDVFLGMFLYEYARRHPDYSVVLLLRLAKTYETTLEKCCAAADPHECYAKVFDEFKPLVEEPQNLIKQNCELFEQLGEYKFQNALLVRYTKKVPQVSTPTLVEVSRNLGKVGSKCCKHPEAKRMPCAEDYLSVVLNQLCVLHEKTPVSDRVTKCCTESLVNRRPCFSALEVDETYVPKEFNAETFTFHADICTLSEKERQIKKQTALVELVKHKPKATKEQLKAVMDDFAAFVEKCCKADDKETCFAEEGKKLVACSGPLGIEGGIISNQQITASSTHRALFGLQKWYPYYARLNKKGLINAWTAAENDRWPWIQINLQRKMRVTGVITQGAKRIGSPEYIKSYKIAYSNDGKTWAMYKVKGTNEDMVFRGNIDNNTPYANSFTPPIKAQYVRLYPQVCRRHCTLRMELLGCELSGCSEPLGMKSGHIQDYQITASSIFRTLNMDMFTWEPRKARLDKQGKVNAWTSGHNDQSQWLQVDLLVPTKVTGIITQGAKDFGHVQFVGSYKLAYSNDGEHWTVYQDEKQRKDKVFQGNFDNDTHRKNVIDPPIYARHIRILPWSWYGRITLRSELLGC

SEQ ID NO: 70 - protein, 1036 aa, Artificial Sequence
  source: /note="Description of Artificial Sequence: Synthetic polypeptide"
DICDPNPCENGGICLPGLADGSFSCECPDGFTDPNCSSVVEVASDEEEPTSAGPCTPNPCHNGGTCEISEAYRGDTFIGYVCKCPRGFNGIHCQHNINECEVEPCKNGGICTDLVANYSCECPGEFMGRNCQYKDAHKSEVAHRFKDLGEENFKALVLIAFAQYLQQSPFEDHVKLVNEVTEFAKTCVADESAENCDKSLHTLFGDKLCTVATLRETYGEMADCCAKQEPERNECFLQHKDDNPNLPRLVRPEVDVMCTAFHDNEETFLKKYLYEIARRHPYFYAPELLFFAKRYKAAFTECCQAADKAACLLPKLDELRDEGKASSAKQRLKCASLQKFGERAFKAWAVARLSQRFPKAEFAEVSKLVTDLTKVHTECCHGDLLECADDRADLAKYICENQDSISSKLKECCEKPLLEKSHCIAEVENDEMPADLPSLAADFVESKDVCKNYAEAKDVFLGMFLYEYARRHPDYSVVLLLRLAKTYETTLEKCCAAADPHECYAKVFDEFKPLVEEPQNLIKQNCELFEQLGEYKFQNALLVRYTKKVPQVSTPTLVEVSRNLGKVGSKCCKHPEAKRMPCAEDYLSVVLNQLCVLHEKTPVSDRVTKCCTESLVNRRPCFSALEVDETYVPKEFNAETFTFHADICTLSEKERQIKKQTALVELVKHKPKATKEQLKAVMDDFAAFVEKCCKADDKETCFAEEGKKLVAASQAALCSGPLGIEGGIISNQQITASSTHRALFGLQKWYPYYARLNKKGLINAWTAAENDRWPWIQINLQRKMRVTGVITQGAKRIGSPEYIKSYKIAYSNDGKTWAMYKVKGTNEDMVFRGNIDNNTPYANSFTPPIKAQYVRLYPQVCRRHCTLRMELLGCELSGCSEPLGMKSGHIQDYQITASSIFRTLNMDMFTWEPRKARLDKQGKVNAWTSGHNDQSQWLQVDLLVPTKVTGIITQGAKDFGHVQFVGSYKLAYSNDGEHWTVYQDEKQRKDKVFQGNFDNDTHRKNVIDPPIYARHIRILPWSWYGRITLRSELLGC

SEQ ID NO: 71 - protein, 872 aa, Artificial Sequence
  source: /note="Description of Artificial Sequence: Synthetic polypeptide"
DICDPNPCENGGICLPGLADGSFSCECPDGFTDPNCSSVVEVASDEEEPTSAGPCTPNPCHNGGTCEISEAYRGDTFIGYVCKCPRGFNGIHCQHNINECEVEPCKNGGICTDLVANYSCECPGEFMGRNCQYKDAHKSEVAHRFKDLGEENFKALVLIAFAQYLQQSPFEDHVKLVNEVTEFAKTCVADESAENCDKSLHTLFGDKLCTVATLRETYGEMADCCAKQEPERNECFLQHKDDNPNLPRLVRPEVDVMCTAFHDNEETFLKKYLYEIARRHPYFYAPELLFFAKRYKAAFTECCQAADKAACLLPKLDELRDEGKASSAKQRLKCASLQKFGERAFKAWAVARLSQRFPKAEFAEVSKLVTDLTKVHTECCHGDLLECADDRADLAKYICENQDSISSKLKECCEKPLLEKSHCIAEVENDEMPADLPSLAADFVESKDVCKNYAEAKDVFLGMFLYEYARRHPDYSVVLLLRLAKTYETTLEKCCAAADPHECYAKVFDEFKPLVEEPQNLIKQNCELFEQLGEYKFQNALLVRYTKKVPQVSTPTLVEVSRNLGKVGSKCCKHPEAKRMPCAEDYLSVVLNQLCVLHEKTPVSDRVTKCCTESLVNRRPCFSALEVDETYVPKEFNAETFTFHADICTLSEKERQIKKQTALVELVKHKPKATKEQLKAVMDDFAAFVEKCCKADDKETCFAEEGKKLVACSGPLGIEGGIISNQQITASSTHRALFGLQKWYPYYARLNKKGLINAWTAAENDRWPWIQINLQRKMRVTGVITQGAKRIGSPEYIKSYKIAYSNDGKTWAMYKVKGTNEDMVFRGNIDNNTPYANSFTPPIKAQYVRLYPQVCRRHCTLRMELLGCELSG

SEQ ID NO: 72 - protein, 878 aa, Artificial Sequence
  source: /note="Description of Artificial Sequence: Synthetic polypeptide"
DICDPNPCENGGICLPGLADGSFSCECPDGFTDPNCSSVVEVASDEEEPTSAGPCTPNPCHNGGTCEISEAYRGDTFIGYVCKCPRGFNGIHCQHNINECEVEPCKNGGICTDLVANYSCECPGEFMGRNCQYKDAHKSEVAHRFKDLGEENFKALVLIAFAQYLQQSPFEDHVKLVNEVTEFAKTCVADESAENCDKSLHTLFGDKLCTVATLRETYGEMADCCAKQEPERNECFLQHKDDNPNLPRLVRPEVDVMCTAFHDNEETFLKKYLYEIARRHPYFYAPELLFFAKRYKAAFTECCQAADKAACLLPKLDELRDEGKASSAKQRLKCASLQKFGERAFKAWAVARLSQRFPKAEFAEVSKLVTDLTKVHTECCHGDLLECADDRADLAKYICENQDSISSKLKECCEKPLLEKSHCIAEVENDEMPADLPSLAADFVESKDVCKNYAEAKDVFLGMFLYEYARRHPDYSVVLLLRLAKTYETTLEKCCAAADPHECYAKVFDEFKPLVEEPQNLIKQNCELFEQLGEYKFQNALLVRYTKKVPQVSTPTLVEVSRNLGKVGSKCCKHPEAKRMPCAEDYLSVVLNQLCVLHEKTPVSDRVTKCCTESLVNRRPCFSALEVDETYVPKEFNAETFTFHADICTLSEKERQIKKQTALVELVKHKPKATKEQLKAVMDDFAAFVEKCCKADDKETCFAEEGKKLVAASQAALCSGPLGIEGGIISNQQITASSTHRALFGLQKWYPYYARLNKKGLINAWTAAENDRWPWIQINLQRKMRVTGVITQGAKRIGSPEYIKSYKIAYSNDGKTWAMYKVKGTNEDMVFRGNIDNNTPYANSFTPPIKAQYVRLYPQVCRRHCTLRMELLGCELSG

SEQ ID NO: 73 - protein, 783 aa, Artificial Sequence
  source: /note="Description of Artificial Sequence: Synthetic polypeptide"
LDICSKNPCHNGGLCEEISQEVRGDVFPSYTCTCLKGYAGNHCETKDAHKSEVAHRFKDLGEENFKALVLIAFAQYLQQSPFEDHVKLVNEVTEFAKTCVADESAENCDKSLHTLFGDKLCTVATLRETYGEMADCCAKQEPERNECFLQHKDDNPNLPRLVRPEVDVMCTAFHDNEETFLKKYLYEIARRHPYFYAPELLFFAKRYKAAFTECCQAADKAACLLPKLDELRDEGKASSAKQRLKCASLQKFGERAFKAWAVARLSQRFPKAEFAEVSKLVTDLTKVHTECCHGDLLECADDRADLAKYICENQDSISSKLKECCEKPLLEKSHCIAEVENDEMPADLPSLAADFVESKDVCKNYAEAKDVFLGMFLYEYARRHPDYSVVLLLRLAKTYETTLEKCCAAADPHECYAKVFDEFKPLVEEPQNLIKQNCELFEQLGEYKFQNALLVRYTKKVPQVSTPTLVEVSRNLGKVGSKCCKHPEAKRMPCAEDYLSVVLNQLCVLHEKTPVSDRVTKCCTESLVNRRPCFSALEVDETYVPKEFNAETFTFHADICTLSEKERQIKKQTALVELVKHKPKATKEQLKAVMDDFAAFVEKCCKADDKETCFAEEGKKLVACVEPLGMENGNIANSQIAASSVRVTFLGLQHWVPELARLNRAGMVNAWTPSSNDDNPWIQVNLLRRMWVTGVVTQGASRLASHEYLKAFKVAYSLNGHEFDFIHDVNKKHKEFVGNWNKNAVHVNLFETPVEAQYVRLYPTSCHTACTLRFELLGCELNG

SEQ ID NO: 74 - protein, 789 aa, Artificial Sequence
  source: /note="Description of Artificial Sequence: Synthetic polypeptide"
LDICSKNPCHNGGLCEEISQEVRGDVFPSYTCTCLKGYAGNHCETKDAHKSEVAHRFKDLGEENFKALVLIAFAQYLQQSPFEDHVKLVNEVTEFAKTCVADESAENCDKSLHTLFGDKLCTVATLRETYGEMADCCAKQEPERNECFLQHKDDNPNLPRLVRPEVDVMCTAFHDNEETFLKKYLYEIARRHPYFYAPELLFFAKRYKAAFTECCQAADKAACLLPKLDELRDEGKASSAKQRLKCASLQKFGERAFKAWAVARLSQRFPKAEFAEVSKLVTDLTKVHTECCHGDLLECADDRADLAKYICENQDSISSKLKECCEKPLLEKSHCIAEVENDEMPADLPSLAADFVESKDVCKNYAEAKDVFLGMFLYEYARRHPDYSVVLLLRLAKTYETTLEKCCAAADPHECYAKVFDEFKPLVEEPQNLIKQNCELFEQLGEYKFQNALLVRYTKKVPQVSTPTLVEVSRNLGKVGSKCCKHPEAKRMPCAEDYLSVVLNQLCVLHEKTPVSDRVTKCCTESLVNRRPCFSALEVDETYVPKEFNAETFTFHADICTLSEKERQIKKQTALVELVKHKPKATKEQLKAVMDDFAAFVEKCCKADDKETCFAEEGKKLVAASQAALCVEPLGMENGNIANSQIAASSVRVTFLGLQHWVPELARLNRAGMVNAWTPSSNDDNPWIQVNLLRRMWVTGVVTQGASRLASHEYLKAFKVAYSLNGHEFDFIHDVNKKHKEFVGNWNKNAVHVNLFETPVEAQYVRLYPTSCHTACTLRFELLGCELNG

SEQ ID NO: 75 - protein, 387 aa, Artificial Sequence
  source: /note="Description of Artificial Sequence: Synthetic polypeptide"
MPRPRLLAALCGALLCAPSLLVALDICSKNPCHNGGLCEEISQEVRGDVFPSYTCTCLKGYAGNHCETKCVEPLGMENGNIANSQIAASSVRVTFLGLQHWVPELARLNRAGMVNAWTPSSNDDNPWIQVNLLRRMWVTGVVTQGASRLASHEYLKAFKVAYSLNGHEFDFIHDVNKKHKEFVGNWNKNAVHVNLFETPVEAQYVRLYPTSCHTACTLRFELLGCELNGCANPLGLKNNSIPDKQITASSSYKTWGLHLFSWNPSYARLDKQGNFNAWVAGSYGNDQWLQVDLGSSKEVTGIITQGARNFGSVQFVASYKVAYSNDSANWTEYQDPRTGSSKIFPGNWDNHSHKKNLFETPILARYVRILPVAWHNRIALRLELLGC

SEQ ID NO: 76 - protein, 318 aa, Artificial Sequence
  source: /note="Description of Artificial Sequence: Synthetic polypeptide"
CVEPLGMENGNIANSQIAASSVRVTFLGLQHWVPELARLNRAGMVNAWTPSSNDDNPWIQVNLLRRMWVTGVVTQGASRLASHEYLKAFKVAYSLNGHEFDFIHDVNKKHKEFVGNWNKNAVHVNLFETPVEAQYVRLYPTSCHTACTLRFELLGCELNGCANPLGLKNNSIPDKQITASSSYKTWGLHLFSWNPSYARLDKQGNFNAWVAGSYGNDQWLQVDLGSSKEVTGIITQGARNFGSVQFVASYKVAYSNDSANWTEYQDPRTGSSKIFPGNWDNHSHKKNLFETPILARYVRILPVAWHNRIALRLELLGC

SEQ ID NO: 77 - protein, 134 aa, Artificial Sequence
  source: /note="Description of Artificial Sequence: Synthetic polypeptide"
DICDPNPCENGGICLPGLADGSFSCECPDGFTDPNCSSVVEVASDEEEPTSAGPCTPNPCHNGGTCEISEAYRGDTFIGYVCKCPRGFNGIHCQHNINECEVEPCKNGGICTDLVANYSCECPGEFMGRNCQYK

SEQ ID NO: 78 - protein, 323 aa, Artificial Sequence
  source: /note="Description of Artificial Sequence: Synthetic polypeptide"
CSGPLGIEGGIISNQQITASSTHRALFGLQKWYPYYARLNKKGLINAWTAAENDRWPWIQINLQRKMRVTGVITQGAKRIGSPEYIKSYKIAYSNDGKTWAMYKVKGTNEDMVFRGNIDNNTPYANSFTPPIKAQYVRLYPQVCRRHCTLRMELLGCELSGCSEPLGMKSGHIQDYQITASSIFRTLNMDMFTWEPRKARLDKQGKVNAWTSGHNDQSQWLQVDLLVPTKVTGIITQGAKDFGHVQFVGSYKLAYSNDGEHWTVYQDEKQRKDKVFQGNFDNDTHRKNVIDPPIYARHIRILPWSWYGRITLRSELLGCTEEE

SEQ ID NO: 79 - protein, 319 aa, Artificial Sequence
  source: /note="Description of Artificial Sequence: Synthetic polypeptide"
CSGPLGIEGGIISNQQITASSTHRALFGLQKWYPYYARLNKKGLINAWTAAENDRWPWIQINLQRKMRVTGVITQGAKRIGSPEYIKSYKIAYSNDGKTWAMYKVKGTNEDMVFRGNIDNNTPYANSFTPPIKAQYVRLYPQVCRRHCTLRMELLGCELSGCSEPLGMKSGHIQDYQITASSIFRTLNMDMFTWEPRKARLDKQGKVNAWTSGHNDQSQWLQVDLLVPTKVTGIITQGAKDFGHVQFVGSYKLAYSNDGEHWTVYQDEKQRKDKVFQGNFDNDTHRKNVIDPPIYARHIRILPWSWYGRITLRSELLGC

SEQ ID NO: 80 - protein, 1029 aa, Artificial Sequence
  source: /note="Description of Artificial Sequence: Synthetic polypeptide"
DICDPNPCENGGICLPGLADGSFSCECPDGFTDPNCSSVVEVASDEEEPTSAGPCTPNPCHNGGTCEISEAYRGDTFIGYVCKCPRGFNGIHCQHNINECEVEPCKNGGICTDLVANYSCECPGEFMGRNCQYKDAHKSEVAHRFKDLGEENFKALVLIAFAQYLQQSPFEDHVKLVNEVTEFAKTCVADESAENCDKSLHTLFGDKLCTVATLRETYGEMADCCAKQEPERNECFLQHKDDNPNLPRLVRPEVDVMCTAFHDNEETFLKKYLYEIARRHPYFYAPELLFFAKRYKAAFTECCQAADKAACLLPKLDELRDEGKASSAKQRLKCASLQKFGERAFKAWAVARLSQRFPKAEFAEVSKLVTDLTKVHTECCHGDLLECADDRADLAKYICENQDSISSKLKECCEKPLLEKSHCIAEVENDEMPADLPSLAADFVESKDVCKNYAEAKDVFLGMFLYEYARRHPDYSVVLLLRLAKTYETTLEKCCAAADPHECYAKVFDEFKPLVEEPQNLIKQNCELFEQLGEYKFQNALLVRYTKKVPQVSTPTLVEVSRNLGKVGSKCCKHPEAKRMPCAEDYLSVVLNQLCVLHEKTPVSDRVTKCCTESLVNRRPCFSALEVDETYVPKEFNAETFTFHADICTLSEKERQIKKQTALVELVKHKPKATKEQLKAVMDDFAAFVEKCCKADDKETCFAEEGKKLVACVEPLGMENGNIANSQIAASSVRVTFLGLQHWVPELARLNRAGMVNAWTPSSNDDNPWIQVNLLRRMWVTGVVTQGASRLASHEYLKAFKVAYSLNGHEFDFIHDVNKKHKEFVGNWNKNAVHVNLFETPVEAQYVRLYPTSCHTACTLRFELLGCELNGCANPLGLKNNSIPDKQITASSSYKTWGLHLFSWNPSYARLDKQGNFNAWVAGSYGNDQWLQVDLGSSKEVTGIITQGARNFGSVQFVASYKVAYSNDSANWTEYQDPRTGSSKIFPGNWDNHSHKKNLFETPILARYVRILPVAWHNRIALRLELLGC

SEQ ID NO: 81 - DNA, 3087 bp, Artificial Sequence
  source: /note="Description of Artificial Sequence: Synthetic polynucleotide"
gacatctgcgaccccaatccttgcgagaatggcggcatttgtctgcctggactggccgatggcagcttctcttgtgaatgccccgatggcttcacagaccccaattgcagctctgtggtggaagtggccagcgacgaggaagaacctacaagcgctggcccctgcacacccaatccatgtcataatggcggaacctgcgagatcagcgaggcctacagaggcgataccttcatcggctacgtgtgcaagtgccccagaggcttcaatggcatccactgccagcacaacatcaacgagtgcgaggtggaaccatgcaagaacggcggcatctgtaccgacctggtggccaattactcttgcgagtgccctggcgagttcatgggcagaaactgccagtacaaggacgcccacaagagcgaggtggcccacagattcaaggacctgggcgaagagaacttcaaggccctggtgctgatcgccttcgctcagtatctccagcagagccctttcgaggaccacgtgaagctggtcaacgaagtgaccgagttcgccaagacctgtgtggccgatgagagcgccgagaactgtgacaagagcctgcacacactgttcggcgacaagctgtgtaccgtggccacactgagagaaacctacggcgagatggccgactgctgtgccaagcaagagcccgagagaaacgagtgcttcctccagcacaaggatgacaaccccaacctgcctagactcgtgcggcctgaagtggatgtgatgtgcaccgcctttcacgacaacgaggaaaccttcctgaagaagtacctgtacgagatcgccagacggcacccctacttttatgcccctgagctgctgttcttcgccaagcggtataaggccgccttcaccgaatgttgccaggccgctgataaggctgcctgtctgctgcctaagctggacgagctgagagatgagggcaaagccagctctgccaagcagagactgaaatgcgccagcctccagaagttcggcgagagagcttttaaggcctgggccgttgccagactgagccagagatttcctaaggccgagtttgccgaggtgtccaagctcgtgaccgatctgacaaaggtgcacaccgagtgctgtcacggcgatctgctggaatgtgccgacgatagagccgacctggccaagtatatctgcgagaaccaggacagcatcagcagcaagctgaaagagtgctgcgagaagcccctgctggaaaagtctcactgtatcgccgaagtggaaaacgacgagatgcccgccgatctgccttctctggctgccgatttcgtggaaagcaaggatgtgtgcaagaactacgccgaggccaaagatgtgtttctgggcatgtttctgtatgagtacgcccgcagacaccccgactattctgtggttctgctgctgcggctggccaagacatacgagacaaccctggaaaaatgctgcgccgctgccgatcctcacgagtgttatgccaaggtgttcgacgagttcaagccactggtggaagaaccccagaacctgatcaagcagaactgcgagctgttcgagcagctgggcgagtacaagttccagaatgccctgctcgtgcggtacaccaagaaagtgcctcaggtgtccacacctacactggttgaggtgtcccggaatctgggcaaagtgggcagcaagtgttgcaagcaccctgaggccaagagaatgccttgcgccgaggattacctgagcgtggtgctgaatcagctgtgcgtgctgcacgagaaaacccctgtgtccgacagagtgaccaagtgctgtaccgagagcctcgtgaacagaaggccttgctttagcgccctggaagtggacgagacatacgtgcccaaagagttcaacgccgagacattcaccttccacgccgatatctgcaccctgtccgagaaagagcggcagatcaagaagcagacagccctggtcgagctggttaagcacaagcccaaggccaccaaagaacagctgaaggccgtgatggacgacttcgccgcctttgtcgagaagtgctgcaaggccgacgacaaagagacatgcttcgccgaagagggcaagaaactggtggcctgtgtggaacccctcggcatggaaaacggcaatatcgccaatagccagattgccgccagcagcgtcagagtgacatttctgggactgcaacactgggtgcccgagctggctagactgaatagagccggcatggtcaacgcctggacacccagcagcaacgacgataacccctggattcaagtgaacctgctgcggcgtatgtgggtcacaggtgttgttacacagggcgcaagcagactggcctctcacgagtacctgaaggcctttaaggtggcctacagcctgaacggccacgagttcgacttcatccacgacgtgaacaagaagcacaaagagtttgtcggcaactggaacaagaacgccgtgcacgtgaacctgttcgagacacctgtggaagcccagtacgtgcggctgtaccctacaagctgtcacaccgcctgcactctgagattcgaactgctgggatgcgagctgaacggctgtgctaatcctctgggcctgaagaacaacagcatccccgataagcagatcaccgccagctccagctataagacatggggcctgcacctgttcagctggaacccttcttacgccagactggacaagcagggcaacttcaatgcttgggtggccggcagctacggcaatgatcagtggctgcaagtggatctgggcagcagcaaagaagtgacaggcatcatcacccaaggggccagaaatttcggcagcgtgcagttcgtggccagctacaaagtggcctactccaacgacagcgccaactggaccgagtatcaggaccctagaaccggcagctccaagatcttccccggcaattgggacaaccacagccacaagaagaatctcttcgagactcccatcctggccagatatgtgcggattctgcctgtggcctggcacaacagaatcgccctgagactggaactgctcggctgt

SEQ ID NO: 82 - protein, 942 aa, Artificial Sequence
  source: /note="Description of Artificial Sequence: Synthetic polypeptide"
LDICSKNPCHNGGLCEEISQEVRGDVFPSYTCTCLKGYAGNHCETKDAHKSEVAHRFKDLGEENFKALVLIAFAQYLQQSPFEDHVKLVNEVTEFAKTCVADESAENCDKSLHTLFGDKLCTVATLRETYGEMADCCAKQEPERNECFLQHKDDNPNLPRLVRPEVDVMCTAFHDNEETFLKKYLYEIARRHPYFYAPELLFFAKRYKAAFTECCQAADKAACLLPKLDELRDEGKASSAKQRLKCASLQKFGERAFKAWAVARLSQRFPKAEFAEVSKLVTDLTKVHTECCHGDLLECADDRADLAKYICENQDSISSKLKECCEKPLLEKSHCIAEVENDEMPADLPSLAADFVESKDVCKNYAEAKDVFLGMFLYEYARRHPDYSVVLLLRLAKTYETTLEKCCAAADPHECYAKVFDEFKPLVEEPQNLIKQNCELFEQLGEYKFQNALLVRYTKKVPQVSTPTLVEVSRNLGKVGSKCCKHPEAKRMPCAEDYLSVVLNQLCVLHEKTPVSDRVTKCCTESLVNRRPCFSALEVDETYVPKEFNAETFTFHADICTLSEKERQIKKQTALVELVKHKPKATKEQLKAVMDDFAAFVEKCCKADDKETCFAEEGKKLVACSGPLGIEGGIISNQQITASSTHRALFGLQKWYPYYARLNKKGLINAWTAAENDRWPWIQINLQRKMRVTGVITQGAKRIGSPEYIKSYKIAYSNDGKTWAMYKVKGTNEDMVFRGNIDNNTPYANSFTPPIKAQYVRLYPQVCRRHCTLRMELLGCELSGCSEPLGMKSGHIQDYQITASSIFRTLNMDMFTWEPRKARLDKQGKVNAWTSGHNDQSQWLQVDLLVPTKVTGIITQGAKDFGHVQFVGSYKLAYSNDGEHWTVYQDEKQRKDKVFQGNFDNDTHRKNVIDPPIYARHIRILPWSWYGRITLRSELLGC

SEQ ID NO: 83 - DNA, 2826 bp, Artificial Sequence
  source: /note="Description of Artificial Sequence: Synthetic polynucleotide"
ctggacatctgtagcaagaacccttgccacaacggcggcctgtgcgaagagatttctcaagaagtgcggggcgacgttttccccagctacacctgtacatgtctgaagggctacgccggcaaccactgcgagacaaaggatgcccacaagagcgaggtggcccacagattcaaggatctgggcgaagagaacttcaaggccctggtgctgatcgccttcgctcagtatctccagcagagccctttcgaggaccacgtgaagctggtcaacgaagtgaccgagttcgccaagacctgtgtggccgatgagagcgccgagaactgtgataagagcctgcacaccctgttcggcgacaagctgtgtacagtggccacactgagagaaacctacggcgagatggccgactgctgtgccaagcaagagcccgagagaaacgagtgcttcctccagcacaaggacgacaaccccaacctgcctagactcgtgcgacccgaagtggatgtgatgtgcaccgcctttcacgacaacgaggaaaccttcctgaagaagtacctgtacgagatcgccagacggcacccctacttttatgcccctgagctgctgttcttcgccaagcggtataaggccgccttcaccgaatgttgccaggccgctgataaggctgcctgtctgctgcctaagctggacgagctgagagatgagggcaaagccagctctgccaagcagagactgaaatgcgccagcctccagaagttcggcgagagagcttttaaggcctgggccgttgccagactgagccagagatttcctaaggccgagtttgccgaggtgtccaagctcgtgaccgatctgacaaaggtgcacaccgagtgctgtcacggcgatctgctggaatgtgccgacgatagagccgacctggccaagtacatctgcgagaaccaggacagcatcagcagcaagctgaaagagtgctgcgagaagcccctgctggaaaagtctcactgtatcgccgaggtggaaaacgacgagatgcctgccgatctgcctagcctggctgccgatttcgtggaaagcaaggacgtgtgcaagaactacgccgaggccaaggatgtgtttctgggcatgtttctgtatgagtacgcccgcagacaccccgactattctgtggttctgctgctgcggctggccaaaacctacgagacaaccctggaaaaatgctgcgccgctgccgatcctcacgagtgttatgccaaggtgttcgacgagttcaagcctctggtggaagaaccccagaacctgatcaagcagaactgcgagctgttcgagcagctgggcgagtacaagttccagaatgccctgctcgtgcggtacaccaagaaagtgcctcaggtgtccacacctacactggttgaggtgtcccggaatctgggcaaagtgggcagcaagtgttgcaagcaccctgaggccaagagaatgccttgcgccgaggattacctgagcgtggtgctgaatcagctgtgcgtgctgcacgagaaaacccctgtgtccgacagagtgaccaagtgctgtaccgagagcctcgtgaacagaaggccttgctttagcgccctggaagtggacgagacatacgtgcccaaagagttcaacgccgagacattcaccttccacgccgacatctgcaccctgtccgagaaagagcggcagatcaagaagcagacagccctggtcgagctggttaagcacaagcccaaggccaccaaagaacagctgaaggccgtgatggacgacttcgccgcctttgtcgagaagtgctgcaaggccgacgacaaagagacatgcttcgccgaagagggcaagaaactggtggcctgttctggccctctgggcatcgaaggcggcatcatcagcaatcagcagatcaccgccagcagcacccacagagcactgtttggcctgcaaaagtggtatccctactacgcccggctgaacaagaagggcctgattaacgcctggacagccgccgagaatgacagatggccctggattcagatcaacctccagcggaagatgagagtgaccggcgttatcacacagggcgcaaagagaatcggctcccctgagtacatcaagagctacaagatcgcctacagcaacgacggcaagacctgggccatgtacaaagtgaagggcaccaacgaggacatggtgttccggggcaacatcgacaacaacaccccttacgccaacagcttcacccctcctatcaaggcccagtacgtgcggctgtaccctcaagtgtgcagaaggcactgtaccctgagaatggaactgctgggctgcgaactgtctggctgttctgagccactgggaatgaagtccggccacatccaggactaccagattaccgcctccagcatcttcagaaccctgaacatggatatgttcacctgggagccccggaaggccagactggataagcagggaaaagtgaatgcctggaccagcggccacaacgaccagtctcaatggctgcaagtggacctgctggtgcctaccaaagtgaccggaatcatcacccaaggcgctaaggatttcggccacgtgcagttcgtgggctcctacaagctggcctactccaatgatggcgagcactggaccgtgtaccaggacgagaagcagcggaaggataaggtgttccagggaaacttcgataacgatacccaccggaagaacgtgatcgaccctccaatctacgccagacacatcagaatcctgccttggtcttggtacggcagaatcaccctgagatccgagctgctgggatgc

SEQ ID NO: 84 - protein, 968 aa, Artificial Sequence
  source: /note="Description of Artificial Sequence: Synthetic polypeptide"
DICDPNPCENGGICLPGLADGSFSCECPDGFTDPNCSSVVEVASDEEEPTGSDAHKSEVAHRFKDLGEENFKALVLIAFAQYLQQSPFEDHVKLVNEVTEFAKTCVADESAENCDKSLHTLFGDKLCTVATLRETYGEMADCCAKQEPERNECFLQHKDDNPNLPRLVRPEVDVMCTAFHDNEETFLKKYLYEIARRHPYFYAPELLFFAKRYKAAFTECCQAADKAACLLPKLDELRDEGKASSAKQRLKCASLQKFGERAFKAWAVARLSQRFPKAEFAEVSKLVTDLTKVHTECCHGDLLECADDRADLAKYICENQDSISSKLKECCEKPLLEKSHCIAEVENDEMPADLPSLAADFVESKDVCKNYAEAKDVFLGMFLYEYARRHPDYSVVLLLRLAKTYETTLEKCCAAADPHECYAKVFDEFKPLVEEPQNLIKQNCELFEQLGEYKFQNALLVRYTKKVPQVSTPTLVEVSRNLGKVGSKCCKHPEAKRMPCAEDYLSVVLNQLCVLHEKTPVSDRVTKCCTESLVNRRPCFSALEVDETYVPKEFNAETFTFHADICTLSEKERQIKKQTALVELVKHKPKATKEQLKAVMDDFAAFVEKCCKADDKETCFAEEGKKLVAASQAALGLGGSGGSGGSGGSCSGPLGIEGGIISNQQITASSTHRALFGLQKWYPYYARLNKKGLINAWTAAENDRWPWIQINLQRKMRVTGVITQGAKRIGSPEYIKSYKIAYSNDGKTWAMYKVKGTNEDMVFRGNIDNNTPYANSFTPPIKAQYVRLYPQVCRRHCTLRMELLGCELSGCSEPLGMKSGHIQDYQITASSIFRTLNMDMFTWEPRKARLDKQGKVNAWTSGHNDQSQWLQVDLLVPTKVTGIITQGAKDFGHVQFVGSYKLAYSNDGEHWTVYQDEKQRKDKVFQGNFDNDTHRKNVIDPPIYARHIRILPWSWYGRITLRSELLGC

SEQ ID NO: 85 - protein, 963 aa, Artificial Sequence
  source: /note="Description of Artificial Sequence: Synthetic polypeptide"
SAGPCTPNPCHNGGTCEISEAYRGDTFIGYVCKCPRGFNGIHCQHGSDAHKSEVAHRFKDLGEENFKALVLIAFAQYLQQSPFEDHVKLVNEVTEFAKTCVADESAENCDKSLHTLFGDKLCTVATLRETYGEMADCCAKQEPERNECFLQHKDDNPNLPRLVRPEVDVMCTAFHDNEETFLKKYLYEIARRHPYFYAPELLFFAKRYKAAFTECCQAADKAACLLPKLDELRDEGKASSAKQRLKCASLQKFGERAFKAWAVARLSQRFPKAEFAEVSKLVTDLTKVHTECCHGDLLECADDRADLAKYICENQDSISSKLKECCEKPLLEKSHCIAEVENDEMPADLPSLAADFVESKDVCKNYAEAKDVFLGMFLYEYARRHPDYSVVLLLRLAKTYETTLEKCCAAADPHECYAKVFDEFKPLVEEPQNLIKQNCELFEQLGEYKFQNALLVRYTKKVPQVSTPTLVEVSRNLGKVGSKCCKHPEAKRMPCAEDYLSVVLNQLCVLHEKTPVSDRVTKCCTESLVNRRPCFSALEVDETYVPKEFNAETFTFHADICTLSEKERQIKKQTALVELVKHKPKATKEQLKAVMDDFAAFVEKCCKADDKETCFAEEGKKLVAASQAALGLGGSGGSGGSGGSCSGPLGIEGGIISNQQITASSTHRALFGLQKWYPYYARLNKKGLINAWTAAENDRWPWIQINLQRKMRVTGVITQGAKRIGSPEYIKSYKIAYSNDGKTWAMYKVKGTNEDMVFRGNIDNNTPYANSFTPPIKAQYVRLYPQVCRRHCTLRMELLGCELSGCSEPLGMKSGHIQDYQITASSIFRTLNMDMFTWEPRKARLDKQGKVNAWTSGHNDQSQWLQVDLLVPTKVTGIITQGAKDFGHVQFVGSYKLAYSNDGEHWTVYQDEKQRKDKVFQGNFDNDTHRKNVIDPPIYARHIRILPWSWYGRITLRSELLGC

SEQ ID NO: 86 - protein, 957 aa, Artificial Sequence
  source: /note="Description of Artificial Sequence: Synthetic polypeptide"
NINECEVEPCKNGGICTDLVANYSCECPGEFMGRNCQYKGSDAHKSEVAHRFKDLGEENFKALVLIAFAQYLQQSPFEDHVKLVNEVTEFAKTCVADESAENCDKSLHTLFGDKLCTVATLRETYGEMADCCAKQEPERNECFLQHKDDNPNLPRLVRPEVDVMCTAFHDNEETFLKKYLYEIARRHPYFYAPELLFFAKRYKAAFTECCQAADKAACLLPKLDELRDEGKASSAKQRLKCASLQKFGERAFKAWAVARLSQRFPKAEFAEVSKLVTDLTKVHTECCHGDLLECADDRADLAKYICENQDSISSKLKECCEKPLLEKSHCIAEVENDEMPADLPSLAADFVESKDVCKNYAEAKDVFLGMFLYEYARRHPDYSVVLLLRLAKTYETTLEKCCAAADPHECYAKVFDEFKPLVEEPQNLIKQNCELFEQLGEYKFQNALLVRYTKKVPQVSTPTLVEVSRNLGKVGSKCCKHPEAKRMPCAEDYLSVVLNQLCVLHEKTPVSDRVTKCCTESLVNRRPCFSALEVDETYVPKEFNAETFTFHADICTLSEKERQIKKQTALVELVKHKPKATKEQLKAVMDDFAAFVEKCCKADDKETCFAEEGKKLVAASQAALGLGGSGGSGGSGGSCSGPLGIEGGIISNQQITASSTHRALFGLQKWYPYYARLNKKGLINAWTAAENDRWPWIQINLQRKMRVTGVITQGAKRIGSPEYIKSYKIAYSNDGKTWAMYKVKGTNEDMVFRGNIDNNTPYANSFTPPIKAQYVRLYPQVCRRHCTLRMELLGCELSGCSEPLGMKSGHIQDYQITASSIFRTLNMDMFTWEPRKARLDKQGKVNAWTSGHNDQSQWLQVDLLVPTKVTGIITQGAKDFGHVQFVGSYKLAYSNDGEHWTVYQDEKQRKDKVFQGNFDNDTHRKNVIDPPIYARHIRILPWSWYGRITLRSELLGC

SEQ ID NO: 87 - protein, 1013 aa, Artificial Sequence
  source: /note="Description of Artificial Sequence: Synthetic polypeptide"
DICDPNPCENGGICLPGLADGSFSCECPDGFTDPNCSSVVEVASDEEEPTSAGPCTPNPCHNGGTCEISEAYRGDTFIGYVCKCPRGFNGIHCQHGSDAHKSEVAHRFKDLGEENFKALVLIAFAQYLQQSPFEDHVKLVNEVTEFAKTCVADESAENCDKSLHTLFGDKLCTVATLRETYGEMADCCAKQEPERNECFLQHKDDNPNLPRLVRPEVDVMCTAFHDNEETFLKKYLYEIARRHPYFYAPELLFFAKRYKAAFTECCQAADKAACLLPKLDELRDEGKASSAKQRLKCASLQKFGERAFKAWAVARLSQRFPKAEFAEVSKLVTDLTKVHTECCHGDLLECADDRADLAKYICENQDSISSKLKECCEKPLLEKSHCIAEVENDEMPADLPSLAADFVESKDVCKNYAEAKDVFLGMFLYEYARRHPDYSVVLLLRLAKTYETTLEKCCAAADPHECYAKVFDEFKPLVEEPQNLIKQNCELFEQLGEYKFQNALLVRYTKKVPQVSTPTLVEVSRNLGKVGSKCCKHPEAKRMPCAEDYLSVVLNQLCVLHEKTPVSDRVTKCCTESLVNRRPCFSALEVDETYVPKEFNAETFTFHADICTLSEKERQIKKQTALVELVKHKPKATKEQLKAVMDDFAAFVEKCCKADDKETCFAEEGKKLVAASQAALGLGGSGGSGGSGGSCSGPLGIEGGIISNQQITASSTHRALFGLQKWYPYYARLNKKGLINAWTAAENDRWPWIQINLQRKMRVTGVITQGAKRIGSPEYIKSYKIAYSNDGKTWAMYKVKGTNEDMVFRGNIDNNTPYANSFTPPIKAQYVRLYPQVCRRHCTLRMELLGCELSGCSEPLGMKSGHIQDYQITASSIFRTLNMDMFTWEPRKARLDKQGKVNAWTSGHNDQSQWLQVDLLVPTKVTGIITQGAKDFGHVQFVGSYKLAYSNDGEHWTVYQDEKQRKDKVFQGNFDNDTHRKNVIDPPIYARHIRILPWSWYGRITLRSELLGC

SEQ ID NO: 88 - protein, 1002 aa, Artificial Sequence
  source: /note="Description of Artificial Sequence: Synthetic polypeptide"
SAGPCTPNPCHNGGTCEISEAYRGDTFIGYVCKCPRGFNGIHCQHNINECEVEPCKNGGICTDLVANYSCECPGEFMGRNCQYKGSDAHKSEVAHRFKDLGEENFKALVLIAFAQYLQQSPFEDHVKLVNEVTEFAKTCVADESAENCDKSLHTLFGDKLCTVATLRETYGEMADCCAKQEPERNECFLQHKDDNPNLPRLVRPEVDVMCTAFHDNEETFLKKYLYEIARRHPYFYAPELLFFAKRYKAAFTECCQAADKAACLLPKLDELRDEGKASSAKQRLKCASLQKFGERAFKAWAVARLSQRFPKAEFAEVSKLVTDLTKVHTECCHGDLLECADDRADLAKYICENQDSISSKLKECCEKPLLEKSHCIAEVENDEMPADLPSLAADFVESKDVCKNYAEAKDVFLGMFLYEYARRHPDYSVVLLLRLAKTYETTLEKCCAAADPHECYAKVFDEFKPLVEEPQNLIKQNCELFEQLGEYKFQNALLVRYTKKVPQVSTPTLVEVSRNLGKVGSKCCKHPEAKRMPCAEDYLSVVLNQLCVLHEKTPVSDRVTKCCTESLVNRRPCFSALEVDETYVPKEFNAETFTFHADICTLSEKERQIKKQTALVELVKHKPKATKEQLKAVMDDFAAFVEKCCKADDKETCFAEEGKKLVAASQAALGLGGSGGSGGSGGSCSGPLGIEGGIISNQQITASSTHRALFGLQKWYPYYARLNKKGLINAWTAAENDRWPWIQINLQRKMRVTGVITQGAKRIGSPEYIKSYKIAYSNDGKTWAMYKVKGTNEDMVFRGNIDNNTPYANSFTPPIKAQYVRLYPQVCRRHCTLRMELLGCELSGCSEPLGMKSGHIQDYQITASSIFRTLNMDMFTWEPRKARLDKQGKVNAWTSGHNDQSQWLQVDLLVPTKVTGIITQGAKDFGHVQFVGSYKLAYSNDGEHWTVYQDEKQRKDKVFQGNFDNDTHRKNVIDPPIYARHIRILPWSWYGRITLRSELLGC

SEQ ID NO: 89 - protein, 1007 aa, Artificial Sequence
  source: /note="Description of Artificial Sequence: Synthetic polypeptide"
DICDPNPCENGGICLPGLADGSFSCECPDGFTDPNCSSVVEVASDEEEPTNINECEVEPCKNGGICTDLVANYSCECPGEFMGRNCQYKGSDAHKSEVAHRFKDLGEENFKALVLIAFAQYLQQSPFEDHVKLVNEVTEFAKTCVADESAENCDKSLHTLFGDKLCTVATLRETYGEMADCCAKQEPERNECFLQHKDDNPNLPRLVRPEVDVMCTAFHDNEETFLKKYLYEIARRHPYFYAPELLFFAKRYKAAFTECCQAADKAACLLPKLDELRDEGKASSAKQRLKCASLQKFGERAFKAWAVARLSQRFPKAEFAEVSKLVTDLTKVHTECCHGDLLECADDRADLAKYICENQDSISSKLKECCEKPLLEKSHCIAEVENDEMPADLPSLAADFVESKDVCKNYAEAKDVFLGMFLYEYARRHPDYSVVLLLRLAKTYETTLEKCCAAADPHECYAKVFDEFKPLVEEPQNLIKQNCELFEQLGEYKFQNALLVRYTKKVPQVSTPTLVEVSRNLGKVGSKCCKHPEAKRMPCAEDYLSVVLNQLCVLHEKTPVSDRVTKCCTESLVNRRPCFSALEVDETYVPKEFNAETFTFHADICTLSEKERQIKKQTALVELVKHKPKATKEQLKAVMDDFAAFVEKCCKADDKETCFAEEGKKLVAASQAALGLGGSGGSGGSGGSCSGPLGIEGGIISNQQITASSTHRALFGLQKWYPYYARLNKKGLINAWTAAENDRWPWIQINLQRKMRVTGVITQGAKRIGSPEYIKSYKIAYSNDGKTWAMYKVKGTNEDMVFRGNIDNNTPYANSFTPPIKAQYVRLYPQVCRRHCTLRMELLGCELSGCSEPLGMKSGHIQDYQITASSIFRTLNMDMFTWEPRKARLDKQGKVNAWTSGHNDQSQWLQVDLLVPTKVTGIITQGAKDFGHVQFVGSYKLAYSNDGEHWTVYQDEKQRKDKVFQGNFDNDTHRKNVIDPPIYARHIRILPWSWYGRITLRSELLGC

SEQ ID NO: 90 - DNA, 2904 bp, Artificial Sequence
  source: /note="Description of Artificial Sequence: Synthetic polynucleotide"
gacatctgcgaccccaacccctgcgagaacggcggcatctgcctgcccggcctggccgacggcagcttcagctgcgagtgccccgacggcttcaccgaccccaactgcagcagcgtggtggaggtggccagcgacgaggaggagcccaccggcagcgacgcccacaagagcgaggtggcccaccggttcaaggacctgggcgaggagaacttcaaggccctggtgctgatcgccttcgcccagtacctgcagcagagccccttcgaggaccacgtgaagctggtgaacgaggtgaccgagttcgccaagacctgcgtggccgacgagagcgccgagaactgcgacaagagcctgcacaccctgttcggcgacaagctgtgcaccgtggccaccctgcgggagacctacggcgagatggccgactgctgcgccaagcaggagcccgagcggaacgagtgcttcctgcagcacaaggacgacaaccccaacctgccccggctggtgcggcccgaggtggacgtgatgtgcaccgccttccacgacaacgaggagaccttcctgaagaagtacctgtacgagatcgcccggcggcacccctacttctacgcccccgagctgctgttcttcgccaagcggtacaaggccgccttcaccgagtgctgccaggccgccgacaaggccgcctgcctgctgcccaagctggacgagctgcgggacgagggcaaggccagcagcgccaagcagcggctgaagtgcgccagcctgcagaagttcggcgagcgggccttcaaggcctgggccgtggcccggctgagccagcggttccccaaggccgagttcgccgaggtgagcaagctggtgaccgacctgaccaaggtgcacaccgagtgctgccacggcgacctgctggagtgcgccgacgaccgggccgacctggccaagtacatctgcgagaaccaggacagcatcagcagcaagctgaaggagtgctgcgagaagcccctgctggagaagagccactgcatcgccgaggtggagaacgacgagatgcccgccgacctgcccagcctggccgccgacttcgtggagagcaaggacgtgtgcaagaactacgccgaggccaaggacgtgttcctgggcatgttcctgtacgagtacgcccggcggcaccccgactacagcgtggtgctgctgctgcggctggccaagacctacgagaccaccctggagaagtgctgcgccgccgccgacccccacgagtgctacgccaaggtgttcgacgagttcaagcccctggtggaggagccccagaacctgatcaagcagaactgcgagctgttcgagcagctgggcgagtacaagttccagaacgccctgctggtgcggtacaccaagaaggtgccccaggtgagcacccccaccctggtggaggtgagccggaacctgggcaaggtgggcagcaagtgctgcaagcaccccgaggccaagcggatgccctgcgccgaggactacctgagcgtggtgctgaaccagctgtgcgtgctgcacgagaagacccccgtgagcgaccgggtgaccaagtgctgcaccgagagcctggtgaaccggcggccctgcttcagcgccctggaggtggacgagacctacgtgcccaaggagttcaacgccgagaccttcaccttccacgccgacatctgcaccctgagcgagaaggagcggcagatcaagaagcagaccgccctggtggagctggtgaagcacaagcccaaggccaccaaggagcagctgaaggccgtgatggacgacttcgccgccttcgtggagaagtgctgcaaggccgacgacaaggagacctgcttcgccgaggagggcaagaagctggtggccgccagccaggccgccctgggcctgggcggcagcggcggcagcggcggcagcggcggcagctgcagcggccccctgggcatcgagggcggcatcatcagcaaccagcagatcaccgccagcagcacccaccgggccctgttcggcctgcagaagtggtacccctactacgcccggctgaacaagaagggcctgatcaacgcctggaccgccgccgagaacgaccggtggccctggatccagatcaacctgcagcggaagatgcgggtgaccggcgtgatcacccagggcgccaagcggatcggcagccccgagtacatcaagagctacaagatcgcctacagcaacgacggcaagacctgggccatgtacaaggtgaagggcaccaacgaggacatggtgttccggggcaacatcgacaacaacaccccctacgccaacagcttcaccccccccatcaaggcccagtacgtgcggctgtacccccaggtgtgccggcggcactgcaccctgcggatggagctgctgggctgcgagctgagcggctgcagcgagcccctgggcatgaagagcggccacatccaggactaccagatcaccgccagcagcatcttccggaccctgaacatggacatgttcacctgggagccccggaaggcccggctggacaagcagggcaaggtgaacgcctggaccagcggccacaacgaccagagccagtggctgcaggtggacctgctggtgcccaccaaggtgaccggcatcatcacccagggcgccaaggacttcggccacgtgcagttcgtgggcagctacaagctggcctacagcaacgacggcgagcactggaccgtgtaccaggacgagaagcagcggaaggacaaggtgttccagggcaacttcgacaacgacacccaccggaagaacgtgatcgacccccccatctacgcccggcacatccggatcctgccctggagctggtacggccggatcaccctgcggagcgagctgctgggctgc

SEQ ID NO: 91 - DNA, 2889 bp, Artificial Sequence
  source: /note="Description of Artificial Sequence: Synthetic polynucleotide"
agcgccggcccctgcacccccaacccctgccacaacggcggcacctgcgagatcagcgaggcctaccggggcgacaccttcatcggctacgtgtgcaagtgcccccggggcttcaacggcatccactgccagcacggcagcgacgcccacaagagcgaggtggcccaccggttcaaggacctgggcgaggagaacttcaaggccctggtgctgatcgccttcgcccagtacctgcagcagagccccttcgaggaccacgtgaagctggtgaacgaggtgaccgagttcgccaagacctgcgtggccgacgagagcgccgagaactgcgacaagagcctgcacaccctgttcggcgacaagctgtgcaccgtggccaccctgcgggagacctacggcgagatggccgactgctgcgccaagcaggagcccgagcggaacgagtgcttcctgcagcacaaggacgacaaccccaacctgccccggctggtgcggcccgaggtggacgtgatgtgcaccgccttccacgacaacgaggagaccttcctgaagaagtacctgtacgagatcgcccggcggcacccctacttctacgcccccgagctgctgttcttcgccaagcggtacaaggccgccttcaccgagtgctgccaggccgccgacaaggccgcctgcctgctgcccaagctggacgagctgcgggacgagggcaaggccagcagcgccaagcagcggctgaagtgcgccagcctgcagaagttcggcgagcgggccttcaaggcctgggccgtggcccggctgagccagcggttccccaaggccgagttcgccgaggtgagcaagctggtgaccgacctgaccaaggtgcacaccgagtgctgccacggcgacctgctggagtgcgccgacgaccgggccgacctggccaagtacatctgcgagaaccaggacagcatcagcagcaagctgaaggagtgctgcgagaagcccctgctggagaagagccactgcatcgccgaggtggagaacgacgagatgcccgccgacctgcccagcctggccgccgacttcgtggagagcaaggacgtgtgcaagaactacgccgaggccaaggacgtgttcctgggcatgttcctgtacgagtacgcccggcggcaccccgactacagcgtggtgctgctgctgcggctggccaagacctacgagaccaccctggagaagtgctgcgccgccgccgacccccacgagtgctacgccaaggtgttcgacgagttcaagcccctggtggaggagccccagaacctgatcaagcagaactgcgagctgttcgagcagctgggcgagtacaagttccagaacgccctgctggtgcggtacaccaagaaggtgccccaggtgagcacccccaccctggtggaggtgagccggaacctgggcaaggtgggcagcaagtgctgcaagcaccccgaggccaagcggatgccctgcgccgaggactacctgagcgtggtgctgaaccagctgtgcgtgctgcacgagaagacccccgtgagcgaccgggtgaccaagtgctgcaccgagagcctggtgaaccggcggccctgcttcagcgccctggaggtggacgagacctacgtgcccaaggagttcaacgccgagaccttcaccttccacgccgacatctgcaccctgagcgagaaggagcggcagatcaagaagcagaccgccctggtggagctggtgaagcacaagcccaaggccaccaaggagcagctgaaggccgtgatggacgacttcgccgccttcgtggagaagtgctgcaaggccgacgacaaggagacctgcttcgccgaggagggcaagaagctggtggccgccagccaggccgccctgggcctgggcggcagcggcggcagcggcggcagcggcggcagctgcagcggccccctgggcatcgagggcggcatcatcagcaaccagcagatcaccgccagcagcacccaccgggccctgttcggcctgcagaagtggtacccctactacgcccggctgaacaagaagggcctgatcaacgcctggaccgccgccgagaacgaccggtggccctggatccagatcaacctgcagcggaagatgcgggtgaccggcgtgatcacccagggcgccaagcggatcggcagccccgagtacatcaagagctacaagatcgcctacagcaacgacggcaagacctgggccatgtacaaggtgaagggcaccaacgaggacatggtgttccggggcaacatcgacaacaacaccccctacgccaacagcttcaccccccccatcaaggcccagtacgtgcggctgtacccccaggtgtgccggcggcactgcaccctgcggatggagctgctgggctgcgagctgagcggctgcagcgagcccctgggcatgaagagcggccacatccaggactaccagatcaccgccagcagcatcttccggaccctgaacatggacatgttcacctgggagccccggaaggcccggctggacaagcagggcaaggtgaacgcctggaccagcggccacaacgaccagagccagtggctgcaggtggacctgctggtgcccaccaaggtgaccggcatcatcacccagggcgccaaggacttcggccacgtgcagttcgtgggcagctacaagctggcctacagcaacgacggcgagcactggaccgtgtaccaggacgagaagcagcggaaggacaaggtgttccagggcaacttcgacaacgacacccaccggaagaacgtgatcgacccccccatctacgcccggcacatccggatcctgccctggagctggtacggccggatcaccctgcggagcgagctgctgggctgc

SEQ ID NO: 92 - DNA, 2871 bp, Artificial Sequence
  source: /note="Description of Artificial Sequence: Synthetic polynucleotide"
aacatcaacgagtgcgaggtggagccctgcaagaacggcggcatctgcaccgacctggtggccaactacagctgcgagtgccccggcgagttcatgggccggaactgccagtacaagggcagcgacgcccacaagagcgaggtggcccaccggttcaaggacctgggcgaggagaacttcaaggccctggtgctgatcgccttcgcccagtacctgcagcagagccccttcgaggaccacgtgaagctggtgaacgaggtgaccgagttcgccaagacctgcgtggccgacgagagcgccgagaactgcgacaagagcctgcacaccctgttcggcgacaagctgtgcaccgtggccaccctgcgggagacctacggcgagatggccgactgctgcgccaagcaggagcccgagcggaacgagtgcttcctgcagcacaaggacgacaaccccaacctgccccggctggtgcggcccgaggtggacgtgatgtgcaccgccttccacgacaacgaggagaccttcctgaagaagtacctgtacgagatcgcccggcggcacccctacttctacgcccccgagctgctgttcttcgccaagcggtacaaggccgccttcaccgagtgctgccaggccgccgacaaggccgcctgcctgctgcccaagctggacgagctgcgggacgagggcaaggccagcagcgccaagcagcggctgaagtgcgccagcctgcagaagttcggcgagcgggccttcaaggcctgggccgtggcccggctgagccagcggttccccaaggccgagttcgccgaggtgagcaagctggtgaccgacctgaccaaggtgcacaccgagtgctgccacggcgacctgctggagtgcgccgacgaccgggccgacctggccaagtacatctgcgagaaccaggacagcatcagcagcaagctgaaggagtgctgcgagaagcccctgctggagaagagccactgcatcgccgaggtggagaacgacgagatgcccgccgacctgcccagcctggccgccgacttcgtggagagcaaggacgtgtgcaagaactacgccgaggccaaggacgtgttcctgggcatgttcctgtacgagtacgcccggcggcaccccgactacagcgtggtgctgctgctgcggctggccaagacctacgagaccaccctggagaagtgctgcgccgccgccgacccccacgagtgctacgccaaggtgttcgacgagttcaagcccctggtggaggagccccagaacctgatcaagcagaactgcgagctgttcgagcagctgggcgagtacaagttccagaacgccctgctggtgcggtacaccaagaaggtgccccaggtgagcacccccaccctggtggaggtgagccggaacctgggcaaggtgggcagcaagtgctgcaagcaccccgaggccaagcggatgccctgcgccgaggactacctgagcgtggtgctgaaccagctgtgcgtgctgcacgagaagacccccgtgagcgaccgggtgaccaagtgctgcaccgagagcctggtgaaccggcggccctgcttcagcgccctggaggtggacgagacctacgtgcccaaggagttcaacgccgagaccttcaccttccacgccgacatctgcaccctgagcgagaaggagcggcagatcaagaagcagaccgccctggtggagctggtgaagcacaagcccaaggccaccaaggagcagctgaaggccgtgatggacgacttcgccgccttcgtggagaagtgctgcaaggccgacgacaaggagacctgcttcgccgaggagggcaagaagctggtggccgccagccaggccgccctgggcctgggcggcagcggcggcagcggcggcagcggcggcagctgcagcggccccctgggcatcgagggcggcatcatcagcaaccagcagatcaccgccagcagcacccaccgggccctgttcggcctgcagaagtggtacccctactacgcccggctgaacaagaagggcctgatcaacgcctggaccgccgccgagaacgaccggtggccctggatccagatcaacctgcagcggaagatgcgggtgaccggcgtgatcacccagggcgccaagcggatcggcagccccgagtacatcaagagctacaagatcgcctacagcaacgacggcaagacctgggccatgtacaaggtgaagggcaccaacgaggacatggtgttccggggcaacatcgacaacaacaccccctacgccaacagcttcaccccccccatcaaggcccagtacgtgcggctgtacccccaggtgtgccggcggcactgcaccctgcggatggagctgctgggctgcgagctgagcggctgcagcgagcccctgggcatgaagagcggccacatccaggactaccagatcaccgccagcagcatcttccggaccctgaacatggacatgttcacctgggagccccggaaggcccggctggacaagcagggcaaggtgaacgcctggaccagcggccacaacgaccagagccagtggctgcaggtggacctgctggtgcccaccaaggtgaccggcatcatcacccagggcgccaaggacttcggccacgtgcagttcgtgggcagctacaagctggcctacagcaacgacggcgagcactggaccgtgtaccaggacgagaagcagcggaaggacaaggtgttccagggcaacttcgacaacgacacccaccggaagaacgtgatcgacccccccatctacgcccggcacatccggatcctgccctggagctggtacggccggatcaccctgcggagcgagctgctgggctgc

SEQ ID NO: 93 - DNA, 3039 bp, Artificial Sequence
  source: /note="Description of Artificial Sequence: Synthetic polynucleotide"
gacatctgcgaccccaacccctgcgagaacggcggcatctgcctgcccggcctggccgacggcagcttcagctgcgagtgccccgacggcttcaccgaccccaactgcagcagcgtggtggaggtggccagcgacgaggaggagcccaccagcgccggcccctgcacccccaacccctgccacaacggcggcacctgcgagatcagcgaggcctaccggggcgacaccttcatcggctacgtgtgcaagtgcccccggggcttcaacggcatccactgccagcacggcagcgacgcccacaagagcgaggtggcccaccggttcaaggacctgggcgaggagaacttcaaggccctggtgctgatcgccttcgcccagtacctgcagcagagccccttcgaggaccacgtgaagctggtgaacgaggtgaccgagttcgccaagacctgcgtggccgacgagagcgccgagaactgcgacaagagcctgcacaccctgttcggcgacaagctgtgcaccgtggccaccctgcgggagacctacggcgagatggccgactgctgcgccaagcaggagcccgagcggaacgagtgcttcctgcagcacaaggacgacaaccccaacctgccccggctggtgcggcccgaggtggacgtgatgtgcaccgccttccacgacaacgaggagaccttcctgaagaagtacctgtacgagatcgcccggcggcacccctacttctacgcccccgagctgctgttcttcgccaagcggtacaaggccgccttcaccgagtgctgccaggccgccgacaaggccgcctgcctgctgcccaagctggacgagctgcgggacgagggcaaggccagcagcgccaagcagcggctgaagtgcgccagcctgcagaagttcggcgagcgggccttcaaggcctgggccgtggcccggctgagccagcggttccccaaggccgagttcgccgaggtgagcaagctggtgaccgacctgaccaaggtgcacaccgagtgctgccacggcgacctgctggagtgcgccgacgaccgggccgacctggccaagtacatctgcgagaaccaggacagcatcagcagcaagctgaaggagtgctgcgagaagcccctgctggagaagagccactgcatcgccgaggtggagaacgacgagatgcccgccgacctgcccagcctggccgccgacttcgtggagagcaaggacgtgtgcaagaactacgccgaggccaaggacgtgttcctgggcatgttcctgtacgagtacgcccggcggcaccccgactacagcgtggtgctgctgctgcggctggccaagacctacgagaccaccctggagaagtgctgcgccgccgccgacccccacgagtgctacgccaaggtgttcgacgagttcaagcccctggtggaggagccccagaacctgatcaagcagaactgcgagctgttcgagcagctgggcgagtacaagttccagaacgccctgctggtgcggtacaccaagaaggtgccccaggtgagcacccccaccctggtggaggtgagccggaacctgggcaaggtgggcagcaagtgctgcaagcaccccgaggccaagcggatgccctgcgccgaggactacctgagcgtggtgctgaaccagctgtgcgtgctgcacgagaagacccccgtgagcgaccgggtgaccaagtgctgcaccgagagcctggtgaaccggcggccctgcttcagcgccctggaggtggacgagacctacgtgcccaaggagttcaacgccgagaccttcaccttccacgccgacatctgcaccctgagcgagaaggagcggcagatcaagaagcagaccgccctggtggagctggtgaagcacaagcccaaggccaccaaggagcagctgaaggccgtgatggacgacttcgccgccttcgtggagaagtgctgcaaggccgacgacaaggagacctgcttcgccgaggagggcaagaagctggtggccgccagccaggccgccctgggcctgggcggcagcggcggcagcggcggcagcggcggcagctgcagcggccccctgggcatcgagggcggcatcatcagcaaccagcagatcaccgccagcagcacccaccgggccctgttcggcctgcagaagtggtacccctactacgcccggctgaacaagaagggcctgatcaacgcctggaccgccgccgagaacgaccggtggccctggatccagatcaacctgcagcggaagatgcgggtgaccggcgtgatcacccagggcgccaagcggatcggcagccccgagtacatcaagagctacaagatcgcctacagcaacgacggcaagacctgggccatgtacaaggtgaagggcaccaacgaggacatggtgttccggggcaacatcgacaacaacaccccctacgccaacagcttcaccccccccatcaaggcccagtacgtgcggctgtacccccaggtgtgccggcggcactgcaccctgcggatggagctgctgggctgcgagctgagcggctgcagcgagcccctgggcatgaagagcggccacatccaggactaccagatcaccgccagcagcatcttccggaccctgaacatggacatgttcacctgggagccccggaaggcccggctggacaagcagggcaaggtgaacgcctggaccagcggccacaacgaccagagccagtggctgcaggtggacctgctggtgcccaccaaggtgaccggcatcatcacccagggcgccaaggacttcggccacgtgcagttcgtgggcagctacaagctggcctacagcaacgacggcgagcactggaccgtgtaccaggacgagaagcagcggaaggacaaggtgttccagggcaacttcgacaacgacacccaccggaagaacgtgatcgacccccccatctacgcccggcacatccggatcctgccctggagctggtacggccggatcaccctgcggagcgagctgctgggctgc

SEQ ID NO: 94 - DNA, 3006 bp, Artificial Sequence
  source: /note="Description of Artificial Sequence: Synthetic polynucleotide"
agcgccggcccctgcacccccaacccctgccacaacggcggcacctgcgagatcagcgaggcctaccggggcgacaccttcatcggctacgtgtgcaagtgcccccggggcttcaacggcatccactgccagcacaacatcaacgagtgcgaggtggagccctgcaagaacggcggcatctgcaccgacctggtggccaactacagctgcgagtgccccggcgagttcatgggccggaactgccagtacaagggcagcgacgcccacaagagcgaggtggcccaccggttcaaggacctgggcgaggagaacttcaaggccctggtgctgatcgccttcgcccagtacctgcagcagagccccttcgaggaccacgtgaagctggtgaacgaggtgaccgagttcgccaagacctgcgtggccgacgagagcgccgagaactgcgacaagagcctgcacaccctgttcggcgacaagctgtgcaccgtggccaccctgcgggagacctacggcgagatggccgactgctgcgccaagcaggagcccgagcggaacgagtgcttcctgcagcacaaggacgacaaccccaacctgccccggctggtgcggcccgaggtggacgtgatgtgcaccgccttccacgacaacgaggagaccttcctgaagaagtacctgtacgagatcgcccggcggcacccctacttctacgcccccgagctgctgttcttcgccaagcggtacaaggccgccttcaccgagtgctgccaggccgccgacaaggccgcctgcctgctgcccaagctggacgagctgcgggacgagggcaaggccagcagcgccaagcagcggctgaagtgcgccagcctgcagaagttcggcgagcgggccttcaaggcctgggccgtggcccggctgagccagcggttccccaaggccgagttcgccgaggtgagcaagctggtgaccgacctgaccaaggtgcacaccgagtgctgccacggcgacctgctggagtgcgccgacgaccgggccgacctggccaagtacatctgcgagaaccaggacagcatcagcagcaagctgaaggagtgctgcgagaagcccctgctggagaagagccactgcatcgccgaggtggagaacgacgagatgcccgccgacctgcccagcctggccgccgacttcgtggagagcaaggacgtgtgcaagaactacgccgaggccaaggacgtgttcctgggcatgttcctgtacgagtacgcccggcggcaccccgactacagcgtggtgctgctgctgcggctggccaagacctacgagaccaccctggagaagtgctgcgccgccgccgacccccacgagtgctacgccaaggtgttcgacgagttcaagcccctggtggaggagccccagaacctgatcaagcagaactgcgagctgttcgagcagctgggcgagtacaagttccagaacgccctgctggtgcggtacaccaagaaggtgccccaggtgagcacccccaccctggtggaggtgagccggaacctgggcaaggtgggcagcaagtgctgcaagcaccccgaggccaagcggatgccctgcgccgaggactacctgagcgtggtgctgaaccagctgtgcgtgctgcacgagaagacccccgtgagcgaccgggtgaccaagtgctgcaccgagagcctggtgaaccggcggccctgcttcagcgccctggaggtggacgagacctacgtgcccaaggagttcaacgccgagaccttcaccttccacgccgacatctgcaccctgagcgagaaggagcggcagatcaagaagcagaccgccctggtggagctggtgaagcacaagcccaaggccaccaaggagcagctgaaggccgtgatggacgacttcgccgccttcgtggagaagtgctgcaaggccgacgacaaggagacctgcttcgccgaggagggcaagaagctggtggccgccagccaggccgccctgggcctgggcggcagcggcggcagcggcggcagcggcggcagctgcagcggccccctgggcatcgagggcggcatcatcagcaaccagcagatcaccgccagcagcacccaccgggccctgttcggcctgcagaagtggtacccctactacgcccggctgaacaagaagggcctgatcaacgcctggaccgccgccgagaacgaccggtggccctggatccagatcaacctgcagcggaagatgcgggtgaccggcgtgatcacccagggcgccaagcggatcggcagccccgagtacatcaagagctacaagatcgcctacagcaacgacggcaagacctgggccatgtacaaggtgaagggcaccaacgaggacatggtgttccggggcaacatcgacaacaacaccccctacgccaacagcttcaccccccccatcaaggcccagtacgtgcggctgtacccccaggtgtgccggcggcactgcaccctgcggatggagctgctgggctgcgagctgagcggctgcagcgagcccctgggcatgaagagcggccacatccaggactaccagatcaccgccagcagcatcttccggaccctgaacatggacatgttcacctgggagccccggaaggcccggctggacaagcagggcaaggtgaacgcctggaccagcggccacaacgaccagagccagtggctgcaggtggacctgctggtgcccaccaaggtgaccggcatcatcacccagggcgccaaggacttcggccacgtgcagttcgtgggcagctacaagctggcctacagcaacgacggcgagcactggaccgtgtaccaggacgagaagcagcggaaggacaaggtgttccagggcaacttcgacaacgacacccaccggaagaacgtgatcgacccccccatctacgcccggcacatccggatcctgccctggagctggtacggccggatcaccctgcggagcgagctgctgggctgc

SEQ ID NO: 95 - DNA, 3021 bp, Artificial Sequence
  source: /note="Description of Artificial Sequence: Synthetic polynucleotide"
gacatctgcgaccccaacccctgcgagaacggcggcatctgcctgcccggcctggccgacggcagcttcagctgcgagtgccccgacggcttcaccgaccccaactgcagcagcgtggtggaggtggccagcgacgaggaggagcccaccaacatcaacgagtgcgaggtggagccctgcaagaacggcggcatctgcaccgacctggtggccaactacagctgcgagtgccccggcgagttcatgggccggaactgccagtacaagggcagcgacgcccacaagagcgaggtggcccaccggttcaaggacctgggcgaggagaacttcaaggccctggtgctgatcgccttcgcccagtacctgcagcagagccccttcgaggaccacgtgaagctggtgaacgaggtgaccgagttcgccaagacctgcgtggccgacgagagcgccgagaactgcgacaagagcctgcacaccctgttcggcgacaagctgtgcaccgtggccaccctgcgggagacctacggcgagatggccgactgctgcgccaagcaggagcccgagcggaacgagtgcttcctgcagcacaaggacgacaaccccaacctgccccggctggtgcggcccgaggtggacgtgatgtgcaccgccttccacgacaacgaggagaccttcctgaagaagtacctgtacgagatcgcccggcggcacccctacttctacgcccccgagctgctgttcttcgccaagcggtacaaggccgccttcaccgagtgctgccaggccgccgacaaggccgcctgcctgctgcccaagctggacgagctgcgggacgagggcaaggccagcagcgccaagcagcggctgaagtgcgccagcctgcagaagttcggcgagcgggccttcaaggcctgggccgtggcccggctgagccagcggttccccaaggccgagttcgccgaggtgagcaagctggtgaccgacctgaccaaggtgcacaccgagtgctgccacggcgacctgctggagtgcgccgacgaccgggccgacctggccaagtacatctgcgagaaccaggacagcatcagcagcaagctgaaggagtgctgcgagaagcccctgctggagaagagccactgcatcgccgaggtggagaacgacgagatgcccgccgacctgcccagcctggccgccgacttcgtggagagcaaggacgtgtgcaagaactacgccgaggccaaggacgtgttcctgggcatgttcctgtacgagtacgcccggcggcaccccgactacagcgtggtgctgctgctgcggctggccaagacctacgagaccaccctggagaagtgctgcgccgccgccgacccccacgagtgctacgccaaggtgttcgacgagttcaagcccctggtggaggagccccagaacctgatcaagcagaactgcgagctgttcgagcagctgggcgagtacaagttccagaacgccctgctggtgcggtacaccaagaaggtgccccaggtgagcacccccaccctggtggaggtgagccggaacctgggcaaggtgggcagcaagtgctgcaagcaccccgaggccaagcggatgccctgcgccgaggactacctgagcgtggtgctgaaccagctgtgcgtgctgcacgagaagacccccgtgagcgaccgggtgaccaagtgctgcaccgagagcctggtgaaccggcggccctgcttcagcgccctggaggtggacgagacctacgtgcccaaggagttcaacgccgagaccttcaccttccacgccgacatctgcaccctgagcgagaaggagcggcagatcaagaagcagaccgccctggtggagctggtgaagcacaagcccaaggccaccaaggagcagctgaaggccgtgatggacgacttcgccgccttcgtggagaagtgctgcaaggccgacgacaaggagacctgcttcgccgaggagggcaagaagctggtggccgccagccaggccgccctgggcctgggcggcagcggcggcagcggcggcagcggcggcagctgcagcggccccctgggcatcgagggcggcatcatcagcaaccagcagatcaccgccagcagcacccaccgggccctgttcggcctgcagaagtggtacccctactacgcccggctgaacaagaagggcctgatcaacgcctggaccgccgccgagaacgaccggtggccctggatccagatcaacctgcagcggaagatgcgggtgaccggcgtgatcacccagggcgccaagcggatcggcagccccgagtacatcaagagctacaagatcgcctacagcaacgacggcaagacctgggccatgtacaaggtgaagggcaccaacgaggacatggtgttccggggcaacatcgacaacaacaccccctacgccaacagcttcaccccccccatcaaggcccagtacgtgcggctgtacccccaggtgtgccggcggcactgcaccctgcggatggagctgctgggctgcgagctgagcggctgcagcgagcccctgggcatgaagagcggccacatccaggactaccagatcaccgccagcagcatcttccggaccctgaacatggacatgttcacctgggagccccggaaggcccggctggacaagcagggcaaggtgaacgcctggaccagcggccacaacgaccagagccagtggctgcaggtggacctgctggtgcccaccaaggtgaccggcatcatcacccagggcgccaaggacttcggccacgtgcagttcgtgggcagctacaagctggcctacagcaacgacggcgagcactggaccgtgtaccaggacgagaagcagcggaaggacaaggtgttccagggcaacttcgacaacgacacccaccggaagaacgtgatcgacccccccatctacgcccggcacatccggatcctgccctggagctggtacggccggatcaccctgcggagcgagctgctgggctgc

SEQ ID NO: 96 - protein, 50 aa, Artificial Sequence
  source: /note="Description of Artificial Sequence: Synthetic polypeptide"
DICDPNPCENGGICLPGLADGSFSCECPDGFTDPNCSSVVEVASDEEEPT

SEQ ID NO: 97 - protein, 45 aa, Artificial Sequence
  source: /note="Description of Artificial Sequence: Synthetic polypeptide"
SAGPCTPNPCHNGGTCEISEAYRGDTFIGYVCKCPRGFNGIHCQH

SEQ ID NO: 98 - protein, 39 aa, Artificial Sequence
  source: /note="Description of Artificial Sequence: Synthetic polypeptide"
NINECEVEPCKNGGICTDLVANYSCECPGEFMGRNCQYK

SEQ ID NO: 99 - protein, 95 aa, Artificial Sequence
  source: /note="Description of Artificial Sequence: Synthetic polypeptide"
DICDPNPCENGGICLPGLADGSFSCECPDGFTDPNCSSVVEVASDEEEPTSAGPCTPNPCHNGGTCEISEAYRGDTFIGYVCKCPRGFNGIHCQH

SEQ ID NO: 100 - protein, 84 aa, Artificial Sequence
  source: /note="Description of Artificial Sequence: Synthetic polypeptide"
SAGPCTPNPCHNGGTCEISEAYRGDTFIGYVCKCPRGFNGIHCQHNINECEVEPCKNGGICTDLVANYSCECPGEFMGRNCQYK

SEQ ID NO: 101 - protein, 89 aa, Artificial Sequence
  source: /note="Description of Artificial Sequence: Synthetic polypeptide"
DICDPNPCENGGICLPGLADGSFSCECPDGFTDPNCSSVVEVASDEEEPTNINECEVEPCKNGGICTDLVANYSCECPGEFMGRNCQYK

SEQ ID NO: 102 - protein, 945 aa, Artificial Sequence
  source: /note="Description of Artificial Sequence: Synthetic polypeptide"
DICDPNPCENGGICLPGLADGSFSCECPDGFTDPNCSSVVEVASDEEEPTDAHKSEVAHRFKDLGEENFKALVLIAFAQYLQQSPFEDHVKLVNEVTEFAKTCVADESAENCDKSLHTLFGDKLCTVATLRETYGEMADCCAKQEPERNECFLQHKDDNPNLPRLVRPEVDVMCTAFHDNEETFLKKYLYEIARRHPYFYAPELLFFAKRYKAAFTECCQAADKAACLLPKLDELRDEGKASSAKQRLKCASLQKFGERAFKAWAVARLSQRFPKAEFAEVSKLVTDLTKVHTECCHGDLLECADDRADLAKYICENQDSISSKLKECCEKPLLEKSHCIAEVENDEMPADLPSLAADFVESKDVCKNYAEAKDVFLGMFLYEYARRHPDYSVVLLLRLAKTYETTLEKCCAAADPHECYAKVFDEFKPLVEEPQNLIKQNCELFEQLGEYKFQNALLVRYTKKVPQVSTPTLVEVSRNLGKVGSKCCKHPEAKRMPCAEDYLSVVLNQLCVLHEKTPVSDRVTKCCTESLVNRRPCFSALEVDETYVPKEFNAETFTFHADICTLSEKERQIKKQTALVELVKHKPKATKEQLKAVMDDFAAFVEKCCKADDKETCFAEEGKKLVACVEPLGMENGNIANSQIAASSVRVTFLGLQHWVPELARLNRAGMVNAWTPSSNDDNPWIQVNLLRRMWVTGVVTQGASRLASHEYLKAFKVAYSLNGHEFDFIHDVNKKHKEFVGNWNKNAVHVNLFETPVEAQYVRLYPTSCHTACTLRFELLGCELNGCANPLGLKNNSIPDKQITASSSYKTWGLHLFSWNPSYARLDKQGNFNAWVAGSYGNDQWLQVDLGSSKEVTGIITQGARNFGSVQFVASYKVAYSNDSANWTEYQDPRTGSSKIFPGNWDNHSHKKNLFETPILARYVRILPVAWHNRIALRLELLGC

SEQ ID NO: 103 - protein, 940 aa, Artificial Sequence
  source: /note="Description of Artificial Sequence: Synthetic polypeptide"
SAGPCTPNPCHNGGTCEISEAYRGDTFIGYVCKCPRGFNGIHCQHDAHKSEVAHRFKDLGEENFKALVLIAFAQYLQQSPFEDHVKLVNEVTEFAKTCVADESAENCDKSLHTLFGDKLCTVATLRETYGEMADCCAKQEPERNECFLQHKDDNPNLPRLVRPEVDVMCTAFHDNEETFLKKYLYEIARRHPYFYAPELLFFAKRYKAAFTECCQAADKAACLLPKLDELRDEGKASSAKQRLKCASLQKFGERAFKAWAVARLSQRFPKAEFAEVSKLVTDLTKVHTECCHGDLLECADDRADLAKYICENQDSISSKLKECCEKPLLEKSHCIAEVENDEMPADLPSLAADFVESKDVCKNYAEAKDVFLGMFLYEYARRHPDYSVVLLLRLAKTYETTLEKCCAAADPHECYAKVFDEFKPLVEEPQNLIKQNCELFEQLGEYKFQNALLVRYTKKVPQVSTPTLVEVSRNLGKVGSKCCKHPEAKRMPCAEDYLSVVLNQLCVLHEKTPVSDRVTKCCTESLVNRRPCFSALEVDETYVPKEFNAETFTFHADICTLSEKERQIKKQTALVELVKHKPKATKEQLKAVMDDFAAFVEKCCKADDKETCFAEEGKKLVACVEPLGMENGNIANSQIAASSVRVTFLGLQHWVPELARLNRAGMVNAWTPSSNDDNPWIQVNLLRRMWVTGVVTQGASRLASHEYLKAFKVAYSLNGHEFDFIHDVNKKHKEFVGNWNKNAVHVNLFETPVEAQYVRLYPTSCHTACTLRFELLGCELNGCANPLGLKNNSIPDKQITASSSYKTWGLHLFSWNPSYARLDKQGNFNAWVAGSYGNDQWLQVDLGSSKEVTGIITQGARNFGSVQFVASYKVAYSNDSANWTEYQDPRTGSSKIFPGNWDNHSHKKNLFETPILARYVRILPVAWHNRIALRLELLGC

SEQ ID NO: 104 - protein, 934 aa, Artificial Sequence
  source: /note="Description of Artificial Sequence: Synthetic polypeptide"
NINECEVEPCKNGGICTDLVANYSCECPGEFMGRNCQYKDAHKSEVAHRFKDLGEENFKALVLIAFAQYLQQSPFEDHVKLVNEVTEFAKTCVADESAENCDKSLHTLFGDKLCTVATLRETYGEMADCCAKQEPERNECFLQHKDDNPNLPRLVRPEVDVMCTAFHDNEETFLKKYLYEIARRHPYFYAPELLFFAKRYKAAFTECCQAADKAACLLPKLDELRDEGKASSAKQRLKCASLQKFGERAFKAWAVARLSQRFPKAEFAEVSKLVTDLTKVHTECCHGDLLECADDRADLAKYICENQDSISSKLKECCEKPLLEKSHCIAEVENDEMPADLPSLAADFVESKDVCKNYAEAKDVFLGMFLYEYARRHPDYSVVLLLRLAKTYETTLEKCCAAADPHECYAKVFDEFKPLVEEPQNLIKQNCELFEQLGEYKFQNALLVRYTKKVPQVSTPTLVEVSRNLGKVGSKCCKHPEAKRMPCAEDYLSVVLNQLCVLHEKTPVSDRVTKCCTESLVNRRPCFSALEVDETYVPKEFNAETFTFHADICTLSEKERQIKKQTALVELVKHKPKATKEQLKAVMDDFAAFVEKCCKADDKETCFAEEGKKLVACVEPLGMENGNIANSQIAASSVRVTFLGLQHWVPELARLNRAGMVNAWTPSSNDDNPWIQVNLLRRMWVTGVVTQGASRLASHEYLKAFKVAYSLNGHEFDFIHDVNKKHKEFVGNWNKNAVHVNLFETPVEAQYVRLYPTSCHTACTLRFELLGCELNGCANPLGLKNNSIPDKQITASSSYKTWGLHLFSWNPSYARLDKQGNFNAWVAGSYGNDQWLQVDLGSSKEVTGIITQGARNFGSVQFVASYKVAYSNDSANWTEYQDPRTGSSKIFPGNWDNHSHKKNLFETPILARYVRILPVAWHNRIALRLELLGC

SEQ ID NO: 105 - protein, 990 aa, Artificial Sequence
  source: /note="Description of Artificial Sequence: Synthetic polypeptide"
DICDPNPCENGGICLPGLADGSFSCECPDGFTDPNCSSVVEVASDEEEPTSAGPCTPNPCHNGGTCEISEAYRGDTFIGYVCKCPRGFNGIHCQHDAHKSEVAHRFKDLGEENFKALVLIAFAQYLQQSPFEDHVKLVNEVTEFAKTCVADESAENCDKSLHTLFGDKLCTVATLRETYGEMADCCAKQEPERNECFLQHKDDNPNLPRLVRPEVDVMCTAFHDNEETFLKKYLYEIARRHPYFYAPELLFFAKRYKAAFTECCQAADKAACLLPKLDELRDEGKASSAKQRLKCASLQKFGERAFKAWAVARLSQRFPKAEFAEVSKLVTDLTKVHTECCHGDLLECADDRADLAKYICENQDSISSKLKECCEKPLLEKSHCIAEVENDEMPADLPSLAADFVESKDVCKNYAEAKDVFLGMFLYEYARRHPDYSVVLLLRLAKTYETTLEKCCAAADPHECYAKVFDEFKPLVEEPQNLIKQNCELFEQLGEYKFQNALLVRYTKKVPQVSTPTLVEVSRNLGKVGSKCCKHPEAKRMPCAEDYLSVVLNQLCVLHEKTPVSDRVTKCCTESLVNRRPCFSALEVDETYVPKEFNAETFTFHADICTLSEKERQIKKQTALVELVKHKPKATKEQLKAVMDDFAAFVEKCCKADDKETCFAEEGKKLVACVEPLGMENGNIANSQIAASSVRVTFLGLQHWVPELARLNRAGMVNAWTPSSNDDNPWIQVNLLRRMWVTGVVTQGASRLASHEYLKAFKVAYSLNGHEFDFIHDVNKKHKEFVGNWNKNAVHVNLFETPVEAQYVRLYPTSCHTACTLRFELLGCELNGCANPLGLKNNSIPDKQITASSSYKTWGLHLFSWNPSYARLDKQGNFNAWVAGSYGNDQWLQVDLGSSKEVTGIITQGARNFGSVQFVASYKVAYSNDSANWTEYQDPRTGSSKIFPGNWDNHSHKKNLFETPILARYVRILPVAWHNRIALRLELLGC

SEQ ID NO: 106 - protein, 979 aa, Artificial Sequence
  source: /note="Description of Artificial Sequence: Synthetic polypeptide"
SAGPCTPNPCHNGGTCEISEAYRGDTFIGYVCKCPRGFNGIHCQHNINECEVEPCKNGGICTDLVANYSCECPGEFMGRNCQYKDAHKSEVAHRFKDLGEENFKALVLIAFAQYLQQSPFEDHVKLVNEVTEFAKTCVADESAENCDKSLHTLFGDKLCTVATLRETYGEMADCCAKQEPERNECFLQHKDDNPNLPRLVRPEVDVMCTAFHDNEETFLKKYLYEIARRHPYFYAPELLFFAKRYKAAFTECCQAADKAACLLPKLDELRDEGKASSAKQRLKCASLQKFGERAFKAWAVARLSQRFPKAEFAEVSKLVTDLTKVHTECCHGDLLECADDRADLAKYICENQDSISSKLKECCEKPLLEKSHCIAEVENDEMPADLPSLAADFVESKDVCKNYAEAKDVFLGMFLYEYARRHPDYSVVLLLRLAKTYETTLEKCCAAADPHECYAKVFDEFKPLVEEPQNLIKQNCELFEQLGEYKFQNALLVRYTKKVPQVSTPTLVEVSRNLGKVGSKCCKHPEAKRMPCAEDYLSVVLNQLCVLHEKTPVSDRVTKCCTESLVNRRPCFSALEVDETYVPKEFNAETFTFHADICTLSEKERQIKKQTALVELVKHKPKATKEQLKAVMDDFAAFVEKCCKADDKETCFAEEGKKLVACVEPLGMENGNIANSQIAASSVRVTFLGLQHWVPELARLNRAGMVNAWTPSSNDDNPWIQVNLLRRMWVTGVVTQGASRLASHEYLKAFKVAYSLNGHEFDFIHDVNKKHKEFVGNWNKNAVHVNLFETPVEAQYVRLYPTSCHTACTLRFELLGCELNGCANPLGLKNNSIPDKQITASSSYKTWGLHLFSWNPSYARLDKQGNFNAWVAGSYGNDQWLQVDLGSSKEVTGIITQGARNFGSVQFVASYKVAYSNDSANWTEYQDPRTGSSKIFPGNWDNHSHKKNLFETPILARYVRILPVAWHNRIALRLELLGC

SEQ ID NO: 107 - protein, 984 aa, Artificial Sequence
  source: /note="Description of Artificial Sequence: Synthetic polypeptide"
DICDPNPCENGGICLPGLADGSFSCECPDGFTDPNCSSVVEVASDEEEPTNINECEVEPCKNGGICTDLVANYSCECPGEFMGRNCQYKDAHKSEVAHRFKDLGEENFKALVLIAFAQYLQQSPFEDHVKLVNEVTEFAKTCVADESAENCDKSLHTLFGDKLCTVATLRETYGEMADCCAKQEPERNECFLQHKDDNPNLPRLVRPEVDVMCTAFHDNEETFLKKYLYEIARRHPYFYAPELLFFAKRYKAAFTECCQAADKAACLLPKLDELRDEGKASSAKQRLKCASLQKFGERAFKAWAVARLSQRFPKAEFAEVSKLVTDLTKVHTECCHGDLLECADDRADLAKYICENQDSISSKLKECCEKPLLEKSHCIAEVENDEMPADLPSLAADFVESKDVCKNYAEAKDVFLGMFLYEYARRHPDYSVVLLLRLAKTYETTLEKCCAAADPHECYAKVFDEFKPLVEEPQNLIKQNCELFEQLGEYKFQNALLVRYTKKVPQVSTPTLVEVSRNLGKVGSKCCKHPEAKRMPCAEDYLSVVLNQLCVLHEKTPVSDRVTKCCTESLVNRRPCFSALEVDETYVPKEFNAETFTFHADICTLSEKERQIKKQTALVELVKHKPKATKEQLKAVMDDFAAFVEKCCKADDKETCFAEEGKKLVACVEPLGMENGNIANSQIAASSVRVTFLGLQHWVPELARLNRAGMVNAWTPSSNDDNPWIQVNLLRRMWVTGVVTQGASRLASHEYLKAFKVAYSLNGHEFDFIHDVNKKHKEFVGNWNKNAVHVNLFETPVEAQYVRLYPTSCHTACTLRFELLGCELNGCANPLGLKNNSIPDKQITASSSYKTWGLHLFSWNPSYARLDKQGNFNAWVAGSYGNDQWLQVDLGSSKEVTGIITQGARNFGSVQFVASYKVAYSNDSANWTEYQDPRTGSSKIFPGNWDNHSHKKNLFETPILARYVRILPVAWHNRIALRLELLGC

SEQ ID NO: 108 - DNA, 2835 bp, Artificial Sequence
  source: /note="Description of Artificial Sequence: Synthetic polynucleotide"
gacatctgcgaccccaacccctgcgagaacggcggcatctgcctgcccggcctggccgacggcagcttcagctgcgagtgccccgacggcttcaccgaccccaactgcagcagcgtggtggaggtggccagcgacgaggaggagcccaccgacgcccacaagagcgaggtggcccaccggttcaaggacctgggcgaggagaacttcaaggccctggtgctgatcgccttcgcccagtacctgcagcagagccccttcgaggaccacgtgaagctggtgaacgaggtgaccgagttcgccaagacctgcgtggccgacgagagcgccgagaactgcgacaagagcctgcacaccctgttcggcgacaagctgtgcaccgtggccaccctgcgggagacctacggcgagatggccgactgctgcgccaagcaggagcccgagcggaacgagtgcttcctgcagcacaaggacgacaaccccaacctgccccggctggtgcggcccgaggtggacgtgatgtgcaccgccttccacgacaacgaggagaccttcctgaagaagtacctgtacgagatcgcccggcggcacccctacttctacgcccccgagctgctgttcttcgccaagcggtacaaggccgccttcaccgagtgctgccaggccgccgacaaggccgcctgcctgctgcccaagctggacgagctgcgggacgagggcaaggccagcagcgccaagcagcggctgaagtgcgccagcctgcagaagttcggcgagcgggccttcaaggcctgggccgtggcccggctgagccagcggttccccaaggccgagttcgccgaggtgagcaagctggtgaccgacctgaccaaggtgcacaccgagtgctgccacggcgacctgctggagtgcgccgacgaccgggccgacctggccaagtacatctgcgagaaccaggacagcatcagcagcaagctgaaggagtgctgcgagaagcccctgctggagaagagccactgcatcgccgaggtggagaacgacgagatgcccgccgacctgcccagcctggccgccgacttcgtggagagcaaggacgtgtgcaagaactacgccgaggccaaggacgtgttcctgggcatgttcctgtacgagtacgcccggcggcaccccgactacagcgtggtgctgctgctgcggctggccaagacctacgagaccaccctggagaagtgctgcgccgccgccgacccccacgagtgctacgccaaggtgttcgacgagttcaagcccctggtggaggagccccagaacctgatcaagcagaactgcgagctgttcgagcagctgggcgagtacaagttccagaacgccctgctggtgcggtacaccaagaaggtgccccaggtgagcacccccaccctggtggaggtgagccggaacctgggcaaggtgggcagcaagtgctgcaagcaccccgaggccaagcggatgccctgcgccgaggactacctgagcgtggtgctgaaccagctgtgcgtgctgcacgagaagacccccgtgagcgaccgggtgaccaagtgctgcaccgagagcctggtgaaccggcggccctgcttcagcgccctggaggtggacgagacctacgtgcccaaggagttcaacgccgagaccttcaccttccacgccgacatctgcaccctgagcgagaaggagcggcagatcaagaagcagaccgccctggtggagctggtgaagcacaagcccaaggccaccaaggagcagctgaaggccgtgatggacgacttcgccgccttcgtggagaagtgctgcaaggccgacgacaaggagacctgcttcgccgaggagggcaagaagctggtggcctgcgtggagcccctgggcatggagaacggcaacatcgccaacagccagatcgccgccagcagcgtgcgggtgaccttcctgggcctgcagcactgggtgcccgagctggcccggctgaaccgggccggcatggtgaacgcctggacccccagcagcaacgacgacaacccctggatccaggtgaacctgctgcggcggatgtgggtgaccggcgtggtgacccagggcgccagccggctggccagccacgagtacctgaaggccttcaaggtggcctacagcctgaacggccacgagttcgacttcatccacgacgtgaacaagaagcacaaggagttcgtgggcaactggaacaagaacgccgtgcacgtgaacctgttcgagacccccgtggaggcccagtacgtgcggctgtaccccaccagctgccacaccgcctgcaccctgcggttcgagctgctgggctgcgagctgaacggctgcgccaaccccctgggcctgaagaacaacagcatccccgacaagcagatcaccgccagcagcagctacaagacctggggcctgcacctgttcagctggaaccccagctacgcccggctggacaagcagggcaacttcaacgcctgggtggccggcagctacggcaacgaccagtggctgcaggtggacctgggcagcagcaaggaggtgaccggcatcatcacccagggcgcccggaacttcggcagcgtgcagttcgtggccagctacaaggtggcctacagcaacgacagcgccaactggaccgagtaccaggacccccggaccggcagcagcaagatcttccccggcaactgggacaaccacagccacaagaagaacctgttcgagacccccatcctggcccggtacgtgcggatcctgcccgtggcctggcacaaccggatcgccctgcggctggagctgctgggctgc

SEQ ID NO: 109 - DNA, 2820 bp, Artificial Sequence
  source: /note="Description of Artificial Sequence: Synthetic polynucleotide"
agcgccggcccctgcacccccaacccctgccacaacggcggcacctgcgagatcagcgaggcctaccggggcgacaccttcatcggctacgtgtgcaagtgcccccggggcttcaacggcatccactgccagcacgacgcccacaagagcgaggtggcccaccggttcaaggacctgggcgaggagaacttcaaggccctggtgctgatcgccttcgcccagtacctgcagcagagccccttcgaggaccacgtgaagctggtgaacgaggtgaccgagttcgccaagacctgcgtggccgacgagagcgccgagaactgcgacaagagcctgcacaccctgttcggcgacaagctgtgcaccgtggccaccctgcgggagacctacggcgagatggccgactgctgcgccaagcaggagcccgagcggaacgagtgcttcctgcagcacaaggacgacaaccccaacctgccccggctggtgcggcccgaggtggacgtgatgtgcaccgccttccacgacaacgaggagaccttcctgaagaagtacctgtacgagatcgcccggcggcacccctacttctacgcccccgagctgctgttcttcgccaagcggtacaaggccgccttcaccgagtgctgccaggccgccgacaaggccgcctgcctgctgcccaagctggacgagctgcgggacgagggcaaggccagcagcgccaagcagcggctgaagtgcgccagcctgcagaagttcggcgagcgggccttcaaggcctgggccgtggcccggctgagccagcggttccccaaggccgagttcgccgaggtgagcaagctggtgaccgacctgaccaaggtgcacaccgagtgctgccacggcgacctgctggagtgcgccgacgaccgggccgacctggccaagtacatctgcgagaaccaggacagcatcagcagcaagctgaaggagtgctgcgagaagcccctgctggagaagagccactgcatcgccgaggtggagaacgacgagatgcccgccgacctgcccagcctggccgccgacttcgtggagagcaaggacgtgtgcaagaactacgccgaggccaaggacgtgttcctgggcatgttcctgtacgagtacgcccggcggcaccccgactacagcgtggtgctgctgctgcggctggccaagacctacgagaccaccctggagaagtgctgcgccgccgccgacccccacgagtgctacgccaaggtgttcgacgagttcaagcccctggtggaggagccccagaacctgatcaagcagaactgcgagctgttcgagcagctgggcgagtacaagttccagaacgccctgctggtgcggtacaccaagaaggtgccccaggtgagcacccccaccctggtggaggtgagccggaacctgggcaaggtgggcagcaagtgctgcaagcaccccgaggccaagcggatgccctgcgccgaggactacctgagcgtggtgctgaaccagctgtgcgtgctgcacgagaagacccccgtgagcgaccgggtgaccaagtgctgcaccgagagcctggtgaaccggcggccctgcttcagcgccctggaggtggacgagacctacgtgcccaaggagttcaacgccgagaccttcaccttccacgccgacatctgcaccctgagcgagaaggagcggcagatcaagaagcagaccgccctggtggagctggtgaagcacaagcccaaggccaccaaggagcagctgaaggccgtgatggacgacttcgccgccttcgtggagaagtgctgcaaggccgacgacaaggagacctgcttcgccgaggagggcaagaagctggtggcctgcgtggagcccctgggcatggagaacggcaacatcgccaacagccagatcgccgccagcagcgtgcgggtgaccttcctgggcctgcagcactgggtgcccgagctggcccggctgaaccgggccggcatggtgaacgcctggacccccagcagcaacgacgacaacccctggatccaggtgaacctgctgcggcggatgtgggtgaccggcgtggtgacccagggcgccagccggctggccagccacgagtacctgaaggccttcaaggtggcctacagcctgaacggccacgagttcgacttcatccacgacgtgaacaagaagcacaaggagttcgtgggcaactggaacaagaacgccgtgcacgtgaacctgttcgagacccccgtggaggcccagtacgtgcggctgtaccccaccagctgccacaccgcctgcaccctgcggttcgagctgctgggctgcgagctgaacggctgcgccaaccccctgggcctgaagaacaacagcatccccgacaagcagatcaccgccagcagcagctacaagacctggggcctgcacctgttcagctggaaccccagctacgcccggctggacaagcagggcaacttcaacgcctgggtggccggcagctacggcaacgaccagtggctgcaggtggacctgggcagcagcaaggaggtgaccggcatcatcacccagggcgcccggaacttcggcagcgtgcagttcgtggccagctacaaggtggcctacagcaacgacagcgccaactggaccgagtaccaggacccccggaccggcagcagcaagatcttccccggcaactgggacaaccacagccacaagaagaacctgttcgagacccccatcctggcccggtacgtgcggatcctgcccgtggcctggcacaaccggatcgccctgcggctggagctgctgggctgc

SEQ ID NO: 110 - DNA, 2802 bp, Artificial Sequence
  source: /note="Description of Artificial Sequence: Synthetic polynucleotide"
aacatcaacgagtgcgaggtggagccctgcaagaacggcggcatctgcaccgacctggtggccaactacagctgcgagtgccccggcgagttcatgggccggaactgccagtacaaggacgcccacaagagcgaggtggcccaccggttcaaggacctgggcgaggagaacttcaaggccctggtgctgatcgccttcgcccagtacctgcagcagagccccttcgaggaccacgtgaagctggtgaacgaggtgaccgagttcgccaagacctgcgtggccgacgagagcgccgagaactgcgacaagagcctgcacaccctgttcggcgacaagctgtgcaccgtggccaccctgcgggagacctacggcgagatggccgactgctgcgccaagcaggagcccgagcggaacgagtgcttcctgcagcacaaggacgacaaccccaacctgccccggctggtgcggcccgaggtggacgtgatgtgcaccgccttccacgacaacgaggagaccttcctgaagaagtacctgtacgagatcgcccggcggcacccctacttctacgcccccgagctgctgttcttcgccaagcggtacaaggccgccttcaccgagtgctgccaggccgccgacaaggccgcctgcctgctgcccaagctggacgagctgcgggacgagggcaaggccagcagcgccaagcagcggctgaagtgcgccagcctgcagaagttcggcgagcgggccttcaaggcctgggccgtggcccggctgagccagcggttccccaaggccgagttcgccgaggtgagcaagctggtgaccgacctgaccaaggtgcacaccgagtgctgccacggcgacctgctggagtgcgccgacgaccgggccgacctggccaagtacatctgcgagaaccaggacagcatcagcagcaagctgaaggagtgctgcgagaagcccctgctggagaagagccactgcatcgccgaggtggagaacgacgagatgcccgccgacctgcccagcctggccgccgacttcgtggagagcaaggacgtgtgcaagaactacgccgaggccaaggacgtgttcctgggcatgttcctgtacgagtacgcccggcggcaccccgactacagcgtggtgctgctgctgcggctggccaagacctacgagaccaccctggagaagtgctgcgccgccgccgacccccacgagtgctacgccaaggtgttcgacgagttcaagcccctggtggaggagccccagaacctgatcaagcagaactgcgagctgttcgagcagctgggcgagtacaagttccagaacgccctgctggtgcggtacaccaagaaggtgccccaggtgagcacccccaccctggtggaggtgagccggaacctgggcaaggtgggcagcaagtgctgcaagcaccccgaggccaagcggatgccctgcgccgaggactacctgagcgtggtgctgaaccagctgtgcgtgctgcacgagaagacccccgtgagcgaccgggtgaccaagtgctgcaccgagagcctggtgaaccggcggccctgcttcagcgccctggaggtggacgagacctacgtgcccaaggagttcaacgccgagaccttcaccttccacgccgacatctgcaccctgagcgagaaggagcggcagatcaagaagcagaccgccctggtggagctggtgaagcacaagcccaaggccaccaaggagcagctgaaggccgtgatggacgacttcgccgccttcgtggagaagtgctgcaaggccgacgacaaggagacctgcttcgccgaggagggcaagaagctggtggcctgcgtggagcccctgggcatggagaacggcaacatcgccaacagccagatcgccgccagcagcgtgcgggtgaccttcctgggcctgcagcactgggtgcccgagctggcccggctgaaccgggccggcatggtgaacgcctggacccccagcagcaacgacgacaacccctggatccaggtgaacctgctgcggcggatgtgggtgaccggcgtggtgacccagggcgccagccggctggccagccacgagtacctgaaggccttcaaggtggcctacagcctgaacggccacgagttcgacttcatccacgacgtgaacaagaagcacaaggagttcgtgggcaactggaacaagaacgccgtgcacgtgaacctgttcgagacccccgtggaggcccagtacgtgcggctgtaccccaccagctgccacaccgcctgcaccctgcggttcgagctgctgggctgcgagctgaacggctgcgccaaccccctgggcctgaagaacaacagcatccccgacaagcagatcaccgccagcagcagctacaagacctggggcctgcacctgttcagctggaaccccagctacgcccggctggacaagcagggcaacttcaacgcctgggtggccggcagctacggcaacgaccagtggctgcaggtggacctgggcagcagcaaggaggtgaccggcatcatcacccagggcgcccggaacttcggcagcgtgcagttcgtggccagctacaaggtggcctacagcaacgacagcgccaactggaccgagtaccaggacccccggaccggcagcagcaagatcttccccggcaactgggacaaccacagccacaagaagaacctgttcgagacccccatcctggcccggtacgtgcggatcctgcccgtggcctggcacaaccggatcgccctgcggctggagctgctgggctgc

SEQ ID NO: 111 - DNA, 2970 bp, Artificial Sequence
  source: /note="Description of Artificial Sequence: Synthetic polynucleotide"
gacatctgcgaccccaacccctgcgagaacggcggcatctgcctgcccggcctggccgacggcagcttcagctgcgagtgccccgacggcttcaccgaccccaactgcagcagcgtggtggaggtggccagcgacgaggaggagcccaccagcgccggcccctgcacccccaacccctgccacaacggcggcacctgcgagatcagcgaggcctaccggggcgacaccttcatcggctacgtgtgcaagtgcccccggggcttcaacggcatccactgccagcacgacgcccacaagagcgaggtggcccaccggttcaaggacctgggcgaggagaacttcaaggccctggtgctgatcgccttcgcccagtacctgcagcagagccccttcgaggaccacgtgaagctggtgaacgaggtgaccgagttcgccaagacctgcgtggccgacgagagcgccgagaactgcgacaagagcctgcacaccctgttcggcgacaagctgtgcaccgtggccaccctgcgggagacctacggcgagatggccgactgctgcgccaagcaggagcccgagcggaacgagtgcttcctgcagcacaaggacgacaaccccaacctgccccggctggtgcggcccgaggtggacgtgatgtgcaccgccttccacgacaacgaggagaccttcctgaagaagtacctgtacgagatcgcccggcggcacccctacttctacgcccccgagctgctgttcttcgccaagcggtacaaggccgccttcaccgagtgctgccaggccgccgacaaggccgcctgcctgctgcccaagctggacgagctgcgggacgagggcaaggccagcagcgccaagcagcggctgaagtgcgccagcctgcagaagttcggcgagcgggccttcaaggcctgggccgtggcccggctgagccagcggttccccaaggccgagttcgccgaggtgagcaagctggtgaccgacctgaccaaggtgcacaccgagtgctgccacggcgacctgctggagtgcgccgacgaccgggccgacctggccaagtacatctgcgagaaccaggacagcatcagcagcaagctgaaggagtgctgcgagaagcccctgctggagaagagccactgcatcgccgaggtggagaacgacgagatgcccgccgacctgcccagcctggccgccgacttcgtggagagcaaggacgtgtgcaagaactacgccgaggccaaggacgtgttcctgggcatgttcctgtacgagtacgcccggcggcaccccgactacagcgtggtgctgctgctgcggctggccaagacctacgagaccaccctggagaagtgctgcgccgccgccgacccccacgagtgctacgccaaggtgttcgacgagttcaagcccctggtggaggagccccagaacctgatcaagcagaactgcgagctgttcgagcagctgggcgagtacaagttccagaacgccctgctggtgcggtacaccaagaaggtgccccaggtgagcacccccaccctggtggaggtgagccggaacctgggcaaggtgggcagcaagtgctgcaagcaccccgaggccaagcggatgccctgcgccgaggactacctgagcgtggtgctgaaccagctgtgcgtgctgcacgagaagacccccgtgagcgaccgggtgaccaagtgctgcaccgagagcctggtgaaccggcggccctgcttcagcgccctggaggtggacgagacctacgtgcccaaggagttcaacgccgagaccttcaccttccacgccgacatctgcaccctgagcgagaaggagcggcagatcaagaagcagaccgccctggtggagctggtgaagcacaagcccaaggccaccaaggagcagctgaaggccgtgatggacgacttcgccgccttcgtggagaagtgctgcaaggccgacgacaaggagacctgcttcgccgaggagggcaagaagctggtggcctgcgtggagcccctgggcatggagaacggcaacatcgccaacagccagatcgccgccagcagcgtgcgggtgaccttcctgggcctgcagcactgggtgcccgagctggcccggctgaaccgggccggcatggtgaacgcctggacccccagcagcaacgacgacaacccctggatccaggtgaacctgctgcggcggatgtgggtgaccggcgtggtgacccagggcgccagccggctggccagccacgagtacctgaaggccttcaaggtggcctacagcctgaacggccacgagttcgacttcatccacgacgtgaacaagaagcacaaggagttcgtgggcaactggaacaagaacgccgtgcacgtgaacctgttcgagacccccgtggaggcccagtacgtgcggctgtaccccaccagctgccacaccgcctgcaccctgcggttcgagctgctgggctgcgagctgaacggctgcgccaaccccctgggcctgaagaacaacagcatccccgacaagcagatcaccgccagcagcagctacaagacctggggcctgcacctgttcagctggaaccccagctacgcccggctggacaagcagggcaacttcaacgcctgggtggccggcagctacggcaacgaccagtggctgcaggtggacctgggcagcagcaaggaggtgaccggcatcatcacccagggcgcccggaacttcggcagcgtgcagttcgtggccagctacaaggtggcctacagcaacgacagcgccaactggaccgagtaccaggacccccggaccggcagcagcaagatcttccccggcaactgggacaaccacagccacaagaagaacctgttcgagacccccatcctggcccggtacgtgcggatcctgcccgtggcctggcacaaccggatcgccctgcggctggagctgctgggctgc

SEQ ID NO: 112 - DNA, 2937 bp, Artificial Sequence
  source: /note="Description of Artificial Sequence: Synthetic polynucleotide"
agcgccggcccctgcacccccaacccctgccacaacggcggcacctgcgagatcagcgaggcctaccggggcgacaccttcatcggctacgtgtgcaagtgcccccggggcttcaacggcatccactgccagcacaacatcaacgagtgcgaggtggagccctgcaagaacggcggcatctgcaccgacctggtggccaactacagctgcgagtgccccggcgagttcatgggccggaactgccagtacaaggacgcccacaagagcgaggtggcccaccggttcaaggacctgggcgaggagaacttcaaggccctggtgctgatcgccttcgcccagtacctgcagcagagccccttcgaggaccacgtgaagctggtgaacgaggtgaccgagttcgccaagacctgcgtggccgacgagagcgccgagaactgcgacaagagcctgcacaccctgttcggcgacaagctgtgcaccgtggccaccctgcgggagacctacggcgagatggccgactgctgcgccaagcaggagcccgagcggaacgagtgcttcctgcagcacaaggacgacaaccccaacctgccccggctggtgcggcccgaggtggacgtgatgtgcaccgccttccacgacaacgaggagaccttcctgaagaagtacctgtacgagatcgcccggcggcacccctacttctacgcccccgagctgctgttcttcgccaagcggtacaaggccgccttcaccgagtgctgccaggccgccgacaaggccgcctgcctgctgcccaagctggacgagctgcgggacgagggcaaggccagcagcgccaagcagcggctgaagtgcgccagcctgcagaagttcggcgagcgggccttcaaggcctgggccgtggcccggctgagccagcggttccccaaggccgagttcgccgaggtgagcaagctggtgaccgacctgaccaaggtgcacaccgagtgctgccacggcgacctgctggagtgcgccgacgaccgggccgacctggccaagtacatctgcgagaaccaggacagcatcagcagcaagctgaaggagtgctgcgagaagcccctgctggagaagagccactgcatcgccgaggtggagaacgacgagatgcccgccgacctgcccagcctggccgccgacttcgtggagagcaaggacgtgtgcaagaactacgccgaggccaaggacgtgttcctgggcatgttcctgtacgagtacgcccggcggcaccccgactacagcgtggtgctgctgctgcggctggccaagacctacgagaccaccctggagaagtgctgcgccgccgccgacccccacgagtgctacgccaaggtgttcgacgagttcaagcccctggtggaggagccccagaacctgatcaagcagaactgcgagctgttcgagcagctgggcgagtacaagttccagaacgccctgctggtgcggtacaccaagaaggtgccccaggtgagcacccccaccctggtggaggtgagccggaacctgggcaaggtgggcagcaagtgctgcaagcaccccgaggccaagcggatgccctgcgccgaggactacctgagcgtggtgctgaaccagctgtgcgtgctgcacgagaagacccccgtgagcgaccgggtgaccaagtgctgcaccgagagcctggtgaaccggcggccctgcttcagcgccctggaggtggacgagacctacgtgcccaaggagttcaacgccgagaccttcaccttccacgccgacatctgcaccctgagcgagaaggagcggcagatcaagaagcagaccgccctggtggagctggtgaagcacaagcccaaggccaccaaggagcagctgaaggccgtgatggacgacttcgccgccttcgtggagaagtgctgcaaggccgacgacaaggagacctgcttcgccgaggagggcaagaagctggtggcctgcgtggagcccctgggcatggagaacggcaacatcgccaacagccagatcgccgccagcagcgtgcgggtgaccttcctgggcctgcagcactgggtgcccgagctggcccggctgaaccgggccggcatggtgaacgcctggacccccagcagcaacgacgacaacccctggatccaggtgaacctgctgcggcggatgtgggtgaccggcgtggtgacccagggcgccagccggctggccagccacgagtacctgaaggccttcaaggtggcctacagcctgaacggccacgagttcgacttcatccacgacgtgaacaagaagcacaaggagttcgtgggcaactggaacaagaacgccgtgcacgtgaacctgttcgagacccccgtggaggcccagtacgtgcggctgtaccccaccagctgccacaccgcctgcaccctgcggttcgagctgctgggctgcgagctgaacggctgcgccaaccccctgggcctgaagaacaacagcatccccgacaagcagatcaccgccagcagcagctacaagacctggggcctgcacctgttcagctggaaccccagctacgcccggctggacaagcagggcaacttcaacgcctgggtggccggcagctacggcaacgaccagtggctgcaggtggacctgggcagcagcaaggaggtgaccggcatcatcacccagggcgcccggaacttcggcagcgtgcagttcgtggccagctacaaggtggcctacagcaacgacagcgccaactggaccgagtaccaggacccccggaccggcagcagcaagatcttccccggcaactgggacaaccacagccacaagaagaacctgttcgagacccccatcctggcccggtacgtgcggatcctgcccgtggcctggcacaaccggatcgccctgcggctggagctgctgggctgc

SEQ ID NO: 113 - DNA, 2952 bp, Artificial Sequence
  source: /note="Description of Artificial Sequence: Synthetic polynucleotide"
gacatctgcgaccccaacccctgcgagaacggcggcatctgcctgcccggcctggccgacggcagcttcagctgcgagtgccccgacggcttcaccgaccccaactgcagcagcgtggtggaggtggccagcgacgaggaggagcccaccaacatcaacgagtgcgaggtggagccctgcaagaacggcggcatctgcaccgacctggtggccaactacagctgcgagtgccccggcgagttcatgggccggaactgccagtacaaggacgcccacaagagcgaggtggcccaccggttcaaggacctgggcgaggagaacttcaaggccctggtgctgatcgccttcgcccagtacctgcagcagagccccttcgaggaccacgtgaagctggtgaacgaggtgaccgagttcgccaagacctgcgtggccgacgagagcgccgagaactgcgacaagagcctgcacaccctgttcggcgacaagctgtgcaccgtggccaccctgcgggagacctacggcgagatggccgactgctgcgccaagcaggagcccgagcggaacgagtgcttcctgcagcacaaggacgacaaccccaacctgccccggctggtgcggcccgaggtggacgtgatgtgcaccgccttccacgacaacgaggagaccttcctgaagaagtacctgtacgagatcgcccggcggcacccctacttctacgcccccgagctgctgttcttcgccaagcggtacaaggccgccttcaccgagtgctgccaggccgccgacaaggccgcctgcctgctgcccaagctggacgagctgcgggacgagggcaaggccagcagcgccaagcagcggctgaagtgcgccagcctgcagaagttcggcgagcgggccttcaaggcctgggccgtggcccggctgagccagcggttccccaaggccgagttcgccgaggtgagcaagctggtgaccgacctgaccaaggtgcacaccgagtgctgccacggcgacctgctggagtgcgccgacgaccgggccgacctggccaagtacatctgcgagaaccaggacagcatcagcagcaagctgaaggagtgctgcgagaagcccctgctggagaagagccactgcatcgccgaggtggagaacgacgagatgcccgccgacctgcccagcctggccgccgacttcgtggagagcaaggacgtgtgcaagaactacgccgaggccaaggacgtgttcctgggcatgttcctgtacgagtacgcccggcggcaccccgactacagcgtggtgctgctgctgcggctggccaagacctacgagaccaccctggagaagtgctgcgccgccgccgacccccacgagtgctacgccaaggtgttcgacgagttcaagcccctggtggaggagccccagaacctgatcaagcagaactgcgagctgttcgagcagctgggcgagtacaagttccagaacgccctgctggtgcggtacaccaagaaggtgccccaggtgagcacccccaccctggtggaggtgagccggaacctgggcaaggtgggcagcaagtgctgcaagcaccccgaggccaagcggatgccctgcgccgaggactacctgagcgtggtgctgaaccagctgtgcgtgctgcacgagaagacccccgtgagcgaccgggtgaccaagtgctgcaccgagagcctggtgaaccggcggccctgcttcagcgccctggaggtggacgagacctacgtgcccaaggagttcaacgccgagaccttcaccttccacgccgacatctgcaccctgagcgagaaggagcggcagatcaagaagcagaccgccctggtggagctggtgaagcacaagcccaaggccaccaaggagcagctgaaggccgtgatggacgacttcgccgccttcgtggagaagtgctgcaaggccgacgacaaggagacctgcttcgccgaggagggcaagaagctggtggcctgcgtggagcccctgggcatggagaacggcaacatcgccaacagccagatcgccgccagcagcgtgcgggtgaccttcctgggcctgcagcactgggtgcccgagctggcccggctgaaccgggccggcatggtgaacgcctggacccccagcagcaacgacgacaacccctggatccaggtgaacctgctgcggcggatgtgggtgaccggcgtggtgacccagggcgccagccggctggccagccacgagtacctgaaggccttcaaggtggcctacagcctgaacggccacgagttcgacttcatccacgacgtgaacaagaagcacaaggagttcgtgggcaactggaacaagaacgccgtgcacgtgaacctgttcgagacccccgtggaggcccagtacgtgcggctgtaccccaccagctgccacaccgcctgcaccctgcggttcgagctgctgggctgcgagctgaacggctgcgccaaccccctgggcctgaagaacaacagcatccccgacaagcagatcaccgccagcagcagctacaagacctggggcctgcacctgttcagctggaaccccagctacgcccggctggacaagcagggcaacttcaacgcctgggtggccggcagctacggcaacgaccagtggctgcaggtggacctgggcagcagcaaggaggtgaccggcatcatcacccagggcgcccggaacttcggcagcgtgcagttcgtggccagctacaaggtggcctacagcaacgacagcgccaactggaccgagtaccaggacccccggaccggcagcagcaagatcttccccggcaactgggacaaccacagccacaagaagaacctgttcgagacccccatcctggcccggtacgtgcggatcctgcccgtggcctggcacaaccggatcgccctgcggctggagctgctgggctgc

SEQ ID NO: 114 - protein, 5 aa, Artificial Sequence
  source: /note="Description of Artificial Sequence: Synthetic peptide"
GGGGS

SEQ ID NO: 115 - protein, 212 aa, Artificial Sequence
  source: /note="Description of Artificial Sequence: Synthetic polypeptide"
LDICSKNPCHNGGLCEEISQEVRGDVFPSYTCTCLKGYAGNHCETKCVEPLGMENGNIANSQIAASSVRVTFLGLQHWVPELARLNRAGMVNAWTPSSNDDNPWIQVNLLRRMWVTGVVTQGASRLASHEYLKAFKVAYSLNGHEFDFIHDVNKKHKEFVGNWNKNAVHVNLFETPVEAQYVRLYPTSCHTACTLRFELLGCELNGHHHHHH

SEQ ID NO: 116 - DNA, 636 bp, Artificial Sequence
  source: /note="Description of Artificial Sequence: Synthetic polynucleotide"
ctggacatctgtagcaagaacccttgccacaacggcggcctgtgcgaagagatttctcaagaagtgcggggcgacgttttccccagctacacctgtacatgtctgaagggctacgccggcaaccactgcgagacaaaatgtgtggaacccctcggcatggaaaacggcaatatcgccaatagccagatcgccgccagcagcgtcagagtgacatttctgggactgcaacactgggtgccagagctggccagactgaatagagccggcatggttaacgcctggacacccagcagcaacgacgacaacccctggattcaagtgaacctgctgcggcgtatgtgggtcacaggtgttgttacacagggcgcaagcagactggccagccacgagtatctgaaggcctttaaggtggcctacagcctgaacggccacgagttcgacttcatccacgacgtgaacaagaagcacaaagagttcgtcggcaactggaacaagaacgccgtgcacgtgaacctgttcgagacacctgtggaagcccagtacgtgcggctgtaccctacaagctgtcacaccgcctgcacactgagattcgagctgctgggctgtgaactgaatggccaccaccaccatcaccac

SEQ ID NO: 117 - protein, 805 aa, Artificial Sequence
  source: /note="Description of Artificial Sequence: Synthetic polypeptide"
LDICSKNPCHNGGLCEEISQEVRGDVFPSYTCTCLKGYAGNHCETKGSDAHKSEVAHRFKDLGEENFKALVLIAFAQYLQQSPFEDHVKLVNEVTEFAKTCVADESAENCDKSLHTLFGDKLCTVATLRETYGEMADCCAKQEPERNECFLQHKDDNPNLPRLVRPEVDVMCTAFHDNEETFLKKYLYEIARRHPYFYAPELLFFAKRYKAAFTECCQAADKAACLLPKLDELRDEGKASSAKQRLKCASLQKFGERAFKAWAVARLSQRFPKAEFAEVSKLVTDLTKVHTECCHGDLLECADDRADLAKYICENQDSISSKLKECCEKPLLEKSHCIAEVENDEMPADLPSLAADFVESKDVCKNYAEAKDVFLGMFLYEYARRHPDYSVVLLLRLAKTYETTLEKCCAAADPHECYAKVFDEFKPLVEEPQNLIKQNCELFEQLGEYKFQNALLVRYTKKVPQVSTPTLVEVSRNLGKVGSKCCKHPEAKRMPCAEDYLSVVLNQLCVLHEKTPVSDRVTKCCTESLVNRRPCFSALEVDETYVPKEFNAETFTFHADICTLSEKERQIKKQTALVELVKHKPKATKEQLKAVMDDFAAFVEKCCKADDKETCFAEEGKKLVAASQAALGLGGSGGSGGSGGSCVEPLGMENGNIANSQIAASSVRVTFLGLQHWVPELARLNRAGMVNAWTPSSNDDNPWIQVNLLRRMWVTGVVTQGASRLASHEYLKAFKVAYSLNGHEFDFIHDVNKKHKEFVGNWNKNAVHVNLFETPVEAQYVRLYPTSCHTACTLRFELLGCELNG

SEQ ID NO: 118 - DNA, 2415 bp, Artificial Sequence
  source: /note="Description of Artificial Sequence: Synthetic polynucleotide"
ctggacatctgtagcaagaacccttgccacaacggcggcctgtgcgaagagatttctcaagaagtgcggggcgacgttttccccagctacacctgtacatgtctgaagggctacgccggcaaccactgcgagacaaaaggatctgatgcccacaagagcgaggtggcccacagattcaaggatctgggcgaagagaacttcaaggccctggtgctgatcgccttcgctcagtatctccagcagagccctttcgaggaccacgtgaagctggtcaacgaagtgaccgagttcgccaagacctgtgtggccgatgagagcgccgagaactgtgataagagcctgcacaccctgttcggcgacaagctgtgtacagtggccacactgagagaaacctacggcgagatggccgactgctgtgccaagcaagagcccgagagaaacgagtgcttcctccagcacaaggacgacaaccccaacctgcctagactcgtgcgacccgaagtggatgtgatgtgcaccgcctttcacgacaacgaggaaaccttcctgaagaagtacctgtacgagatcgccagacggcacccctacttttatgcccctgagctgctgttcttcgccaagcggtataaggccgccttcaccgaatgttgccaggccgctgataaggctgcctgtctgctgcctaagctggacgagctgagagatgagggcaaagccagctctgccaagcagagactgaaatgcgccagcctccagaagttcggcgagagagcttttaaggcctgggccgttgccagactgagccagagatttcctaaggccgagtttgccgaggtgtccaagctcgtgaccgatctgacaaaggtgcacaccgagtgctgtcacggcgatctgctggaatgtgccgacgatagagccgacctggccaagtacatctgcgagaaccaggacagcatcagcagcaagctgaaagagtgctgcgagaagcccctgctggaaaagtctcactgtatcgccgaggtggaaaacgacgagatgcctgccgatctgcctagcctggctgccgatttcgtggaaagcaaggacgtgtgcaagaactacgccgaggccaaggatgtgtttctgggcatgtttctgtatgagtacgcccgcagacaccccgactattctgtggttctgctgctgcggctggccaaaacctacgagacaaccctggaaaaatgctgcgccgctgccgatcctcacgagtgttatgccaaggtgttcgacgagttcaagcctctggtggaagaaccccagaacctgatcaagcagaactgcgagctgttcgagcagctgggcgagtacaagttccagaatgccctgctcgtgcggtacaccaagaaagtgcctcaggtgtccacacctacactggttgaggtgtcccggaatctgggcaaagtgggcagcaagtgttgcaagcaccctgaggccaagagaatgccttgcgccgaggattacctgagcgtggtgctgaatcagctgtgcgtgctgcacgagaaaacccctgtgtccgacagagtgaccaagtgctgtaccgagagcctcgtgaacagaaggccttgctttagcgccctggaagtggacgagacatacgtgcccaaagagttcaacgccgagacattcaccttccacgccgacatctgcaccctgtccgagaaagagcggcagatcaagaagcagacagccctggtcgagctggttaagcacaagcccaaggccaccaaagaacagctgaaggccgtgatggacgacttcgccgcctttgtcgagaagtgctgcaaggccgacgacaaagagacatgcttcgccgaagagggcaagaaactggtggctgcctctcaggctgctctcggacttggtggaagcggaggaagtggtggatctggcggatcttgtgtggaacccctcggcatggaaaacggcaatatcgccaatagccagattgccgccagcagcgtcagagtgacatttctgggactgcaacactgggtgcccgagctggctagactgaatagagccggcatggtcaacgcctggacacccagcagcaacgacgataatccctggattcaagtgaacctgctgcggcgtatgtgggtcacaggtgttgttacacagggcgcaagcagactggccagccacgagtatctgaaggcctttaaggtggcctacagcctgaacggccacgagttcgacttcatccacgacgtgaacaagaagcacaaagagtttgtcggcaactggaacaagaacgccgtgcacgtgaacctgttcgagacacctgtggaagcccagtacgtgcggctgtaccctacaagctgtcacaccgcctgcactctgagattcgaactgctgggatgcgagctgaacggc

SEQ ID NO: 119 - protein, 789 aa, Artificial Sequence; identical to SEQ ID NO: 74
  source: /note="Description of Artificial Sequence: Synthetic polypeptide"

SEQ ID NO: 120 - DNA, 2367 bp, Artificial Sequence
  source: /note="Description of Artificial Sequence: Synthetic polynucleotide"
ctggacatctgtagcaagaacccttgccacaacggcggcctgtgcgaagagatttctcaagaagtgcggggcgacgttttccccagctacacctgtacatgtctgaagggctacgccggcaaccactgcgagacaaaggatgcccacaagagcgaggtggcccacagattcaaggatctgggcgaagagaacttcaaggccctggtgctgatcgccttcgctcagtatctccagcagagccctttcgaggaccacgtgaagctggtcaacgaagtgaccgagttcgccaagacctgtgtggccgatgagagcgccgagaactgtgataagagcctgcacaccctgttcggcgacaagctgtgtacagtggccacactgagagaaacctacggcgagatggccgactgctgtgccaagcaagagcccgagagaaacgagtgcttcctccagcacaaggacgacaaccccaacctgcctagactcgtgcgacccgaagtggatgtgatgtgcaccgcctttcacgacaacgaggaaaccttcctgaagaagtacctgtacgagatcgccagacggcacccctacttttatgcccctgagctgctgttcttcgccaagcggtataaggccgccttcaccgaatgttgccaggccgctgataaggctgcctgtctgctgcctaagctggacgagctgagagatgagggcaaagccagctctgccaagcagagactgaaatgcgccagcctccagaagttcggcgagagagcttttaaggcctgggccgttgccagactgagccagagatttcctaaggccgagtttgccgaggtgtccaagctcgtgaccgatctgacaaaggtgcacaccgagtgctgtcacggcgatctgctggaatgtgccgacgatagagccgacctggccaagtacatctgcgagaaccaggacagcatcagcagcaagctgaaagagtgctgcgagaagcccctgctggaaaagtctcactgtatcgccgaggtggaaaacgacgagatgcctgccgatctgcctagcctggctgccgatttcgtggaaagcaaggacgtgtgcaagaactacgccgaggccaaggatgtgtttctgggcatgtttctgtatgagtacgcccgcagacaccccgactattctgtggttctgctgctgcggctggccaaaacctacgagacaaccctggaaaaatgctgcgccgctgccgatcctcacgagtgttatgccaaggtgttcgacgagttcaagcctctggtggaagaaccccagaacctgatcaagcagaactgcgagctgttcgagcagctgggcgagtacaagttccagaatgccctgctcgtgcggtacaccaagaaagtgcctcaggtgtccacacctacactggttgaggtgtcccggaatctgggcaaagtgggcagcaagtgttgcaagcaccctgaggccaagagaatgccttgcgccgaggattacctgagcgtggtgctgaatcagctgtgcgtgctgcacgagaaaacccctgtgtccgacagagtgaccaagtgctgtaccgagagcctcgtgaacagaaggccttgctttagcgccctggaagtggacgagacatacgtgcccaaagagttcaacgccgagacattcaccttccacgccgacatctgcaccctgtccgagaaagagcggcagatcaagaagcagacagccctggtcgagctggttaagcacaagcccaaggccaccaaagaacagctgaaggccgtgatggacgacttcgccgcctttgtcgagaagtgctgcaaggccgacgacaaagagacatgcttcgccgaagagggcaagaaactggtggctgcttctcaggccgctctgtgtgtggaacccctcggcatggaaaacggcaatatcgccaatagccagattgccgccagcagcgtcagagtgacatttctgggactgcaacactgggtgcccgagctggctagactgaatagagccggcatggtcaacgcctggacacccagcagcaacgacgataatccctggattcaagtgaacctgctgcggcgtatgtgggtcacaggtgttgttacacagggcgcaagcagactggccagccacgagtatctgaaggcctttaaggtggcctacagcctgaacggccacgagttcgacttcatccacgacgtgaacaagaagcacaaagagtttgtcggcaactggaacaagaacgccgtgcacgtgaacctgttcgagacacctgtggaagcccagtacgtgcggctgtaccctacaagctgtcacaccgcctgcactctgagattcgaactgctgggatgcgagctgaacggc

SEQ ID NO: 121 - protein, 783 aa, Artificial Sequence; identical to SEQ ID NO: 73
  source: /note="Description of Artificial Sequence: Synthetic polypeptide"

SEQ ID NO: 122 - DNA, 2349 bp, Artificial Sequence
  source: /note="Description of Artificial Sequence: Synthetic polynucleotide"
ctggacatctgtagcaagaacccttgccacaacggcggcctgtgcgaagagatttctcaagaagtgcggggcgacgttttccccagctacacctgtacatgtctgaagggctacgccggcaaccactgcgagacaaaggatgcccacaagagcgaggtggcccacagattcaaggatctgggcgaagagaacttcaaggccctggtgctgatcgccttcgctcagtatctccagcagagccctttcgaggaccacgtgaagctggtcaacgaagtgaccgagttcgccaagacctgtgtggccgatgagagcgccgagaactgtgataagagcctgcacaccctgttcggcgacaagctgtgtacagtggccacactgagagaaacctacggcgagatggccgactgctgtgccaagcaagagcccgagagaaacgagtgcttcctccagcacaaggacgacaaccccaacctgcctagactcgtgcgacccgaagtggatgtgatgtgcaccgcctttcacgacaacgaggaaaccttcctgaagaagtacctgtacgagatcgccagacggcacccctacttttatgcccctgagctgctgttcttcgccaagcggtataaggccgccttcaccgaatgttgccaggccgctgataaggctgcctgtctgctgcctaagctggacgagctgagagatgagggcaaagccagctctgccaagcagagactgaaatgcgccagcctccagaagttcggcgagagagcttttaaggcctgggccgttgccagactgagccagagatttcctaaggccgagtttgccgaggtgtccaagctcgtgaccgatctgacaaaggtgcacaccgagtgctgtcacggcgatctgctggaatgtgccgacgatagagccgacctggccaagtacatctgcgagaaccaggacagcatcagcagcaagctgaaagagtgctgcgagaagcccctgctggaaaagtctcactgtatcgccgaggtggaaaacgacgagatgcctgccgatctgcctagcctggctgccgatttcgtggaaagcaaggacgtgtgcaagaactacgccgaggccaaggatgtgtttctgggcatgtttctgtatgagtacgcccgcagacaccccgactattctgtggttctgctgctgcggctggccaaaacctacgagacaaccctggaaaaatgctgcgccgctgccgatcctcacgagtgttatgccaaggtgttcgacgagttcaagcctctggtggaagaaccccagaacctgatcaagcagaactgcgagctgttcgagcagctgggcgagtacaagttccagaatgccctgctcgtgcggtacaccaagaaagtgcctcaggtgtccacacctacactggttgaggtgtcccggaatctgggcaaagtgggcagcaagtgttgcaagcaccctgaggccaagagaatgccttgcgccgaggattacctgagcgtggtgctgaatcagctgtgcgtgctgcacgagaaaacccctgtgtccgacagagtgaccaagtgctgtaccgagagcctcgtgaacagaaggccttgctttagcgccctggaagtggacgagacatacgtgcccaaagagttcaacgccgagacattcaccttccacgccgacatctgcaccctgtccgagaaagagcggcagatcaagaagcagacagccctggtcgagctggttaagcacaagcccaaggccaccaaagaacagctgaaggccgtgatggacgacttcgccgcctttgtcgagaagtgctgcaaggccgacgacaaagagacatgcttcgccgaagagggcaagaaactggtggcctgtgtggaacccctcggcatggaaaacggcaatatcgccaatagccagattgccgccagcagcgtcagagtgacatttctgggactgcaacactgggtgcccgagctggctagactgaatagagccggcatggtcaacgcctggacacccagcagcaacgacgataatccctggattcaagtgaacctgctgcggcgtatgtgggtcacaggtgttgttacacagggcgcaagcagactggccagccacgagtatctgaaggcctttaaggtggcctacagcctgaacggccacgagttcgacttcatccacgacgtgaacaagaagcacaaagagtttgtcggcaactggaacaagaacgccgtgcacgtgaacctgttcgagacacctgtggaagcccagtacgtgcggctgtaccctacaagctgtcacaccgcctgcactctgagattcgaactgctgggatgcgagctgaacggc

SEQ ID NO: 123 - protein, 227 aa, Artificial Sequence
  source: /note="Description of Artificial Sequence: Synthetic polypeptide"
DKTHTCPPCPAPELLGGPSVFLFPPKPKDTLMISRTPEVTCVVVAVSHEDPEVKFNWYVDGVEVHNAKTKPREEQYNSTYRVVSVLTVLHQDWLNGKEYKCKVSNKALAAPIEKTISKAKGQPREPQVCTLPPSRDELTKNQVSLSCAVKGFYPSDIAVEWESNGQPENNYKTTPPVLDSDGSFFLVSKLTVDKSRWQQGNVFSCSVMHEALHNHYTQKSLSLSPGK

SEQ ID NO: 124 - DNA, 681 bp, Artificial Sequence
  source: /note="Description of Artificial Sequence: Synthetic polynucleotide"
gataagacccacacctgtcctccatgtcctgctccagaactgctcggcggaccctccgttttcctgtttccacctaagcctaaggacaccctgatgatcagcagaacccctgaagtgacctgtgtggtggtggccgtgtctcacgaagatcccgaagtgaagttcaattggtacgtggacggcgtggaagtgcacaacgccaagaccaagcctagagaggaacagtacaacagcacctacagagtggtgtccgtgctgaccgtgctgcaccaggattggctgaacggcaaagagtacaagtgcaaggtgtccaacaaggccctggccgctcctatcgagaaaaccatctctaaggccaagggccagcctcgggaacctcaagtctgtacactgcctcctagccgggacgagctgaccaaaaatcaggtgtccctgagctgcgccgtgaagggcttttacccttccgatatcgccgtggaatgggagagcaatggccagcctgagaacaactacaagaccacacctcctgtgctggacagcgacggctcattctttctggtgtccaagctgacagtggacaagagcagatggcagcagggcaacgtgttcagctgttctgtgatgcacgaggccctgcacaaccactacacccagaagtctctgtctctgagccccggcaaa

SEQ ID NO: 125 - protein, 605 aa, Artificial Sequence
  source: /note="Description of Artificial Sequence: Synthetic polypeptide"
LDICSKNPCHNGGLCEEISQEVRGDVFPSYTCTCLKGYAGNHCETKGSDKTHTCPPCPAPELLGGPSVFLFPPKPKDTLMISRTPEVTCVVVAVSHEDPEVKFNWYVDGVEVHNAKTKPREEQYNSTYRVVSVLTVLHQDWLNGKEYKCKVSNKALAAPIEKTISKAKGQPREPQVYTLPPCREEMTKNQVSLWCLVKGFYPSDIAVEWESNGQPENNYKTTPPVLDSDGSFFLYSKLTVDKSRWQQGNVFSCSVMHEALHNHYTQKSLSLSPGKGGSGGSGGSGGSCVEPLGMENGNIANSQIAASSVRVTFLGLQHWVPELARLNRAGMVNAWTPSSNDDNPWIQVNLLRRMWVTGVVTQGASRLASHEYLKAFKVAYSLNGHEFDFIHDVNKKHKEFVGNWNKNAVHVNLFETPVEAQYVRLYPTSCHTACTLRFELLGCELNGCANPLGLKNNSIPDKQITASSSYKTWGLHLFSWNPSYARLDKQGNFNAWVAGSYGNDQWLQVDLGSSKEVTGIITQGARNFGSVQFVASYKVAYSNDSANWTEYQDPRTGSSKIFPGNWDNHSHKKNLFETPILARYVRILPVAWHNRIALRLELLGC

SEQ ID NO: 126 - DNA, 1815 bp, Artificial Sequence
  source: /note="Description of Artificial Sequence: Synthetic polynucleotide"
ctggacatctgtagcaagaacccttgccacaacggcggcctgtgcgaagagatttctcaagaagtgcggggcgacgttttccccagctacacctgtacatgtctgaagggctacgccggcaaccactgcgagacaaagggcagcgataagacccacacctgtcctccatgtcctgctccagaactgctcggcggaccctccgttttcctgtttccacctaagcctaaggacaccctgatgatcagcagaacccctgaagtgacctgtgtggtggtggccgtgtctcacgaagatcccgaagtgaagttcaattggtacgtggacggcgtggaagtgcacaacgccaagaccaagcctagagaggaacagtacaacagcacctacagagtggtgtccgtgctgaccgtgctgcaccaggattggctgaacggcaaagagtacaagtgcaaggtgtccaacaaggccctggccgctcctatcgagaaaaccatctctaaggccaagggccagcctcgggaacctcaggtttacaccctgcctccatgccgggaagagatgaccaagaatcaggtgtccctgtggtgcctggtcaagggcttctacccttccgatatcgccgtggaatgggagagcaatggccagcctgagaacaactacaagaccacacctcctgtgctggacagcgacggctcattcttcctgtacagcaagctgacagtggacaagagcagatggcagcagggcaacgtgttcagctgttctgtgatgcacgaggccctgcacaaccactacacccagaagtctctgtctctgagccctggcaaaggcggaagcggtggaagcggaggatctggcggatcttgtgtggaacccctcggcatggaaaacggcaatatcgccaatagccagatcgccgccagcagcgtcagagtgacatttctgggactgcaacactgggtgccagagctggccagactgaatagagccggcatggttaacgcctggacacccagcagcaacgacgacaacccctggattcaagtgaacctgctgcggcgtatgtgggtcacaggtgttgttacacagggcgcaagcagactggccagccacgagtatctgaaggcctttaaggtggcctacagcctgaacggccacgagttcgacttcatccacgacgtgaacaagaagcacaaagagttcgtcggcaactggaacaagaacgccgtgcacgtgaacctgttcgagacacctgtggaagcccagtacgtgcggctgtaccctacaagctgtcacaccgcctgcacactgagattcgagctgctgggctgcgagctgaatggctgtgctaatcctctgggcctgaagaacaatagcatccccgacaagcagatcaccgcctccagcagctataagacatggggcctgcacctgtttagctggaaccctagctacgccagactggacaagcagggaaacttcaatgcctgggtggccggcagctacggcaatgatcaatggctgcaagtggacctgggcagcagcaaagaagtgaccggcatcattacccagggcgctagaaatttcggcagcgtgcagttcgtggccagctacaaagtggcctactccaacgacagcgccaactggaccgagtatcaggaccctagaaccggcagctccaagatcttccccggcaattgggacaaccacagccacaagaagaatctgttcgaaacccctatcctggccagatatgtgcgcattctgcccgtggcctggcacaacagaattgccctgagactggaactgctgggatgc

SEQ ID NO: 127 - protein, 227 aa, Artificial Sequence
  source: /note="Description of Artificial Sequence: Synthetic polypeptide"
DKTHTCPPCPAPELLGGPSVFLFPPKPKDTLMISRTPEVTCVVVAVSHEDPEVKFNWYVDGVEVHNAKTKPREEQYNSTYRVVSVLTVLHQDWLNGKEYKCKVSNKALAAPIEKTISKAKGQPREPQVYTLPPCREEMTKNQVSLWCLVKGFYPSDIAVEWESNGQPENNYKTTPPVLDSDGSFFLYSKLTVDKSRWQQGNVFSCSVMHEALHNHYTQKSLSLSPGK

SEQ ID NO: 128 - DNA, 681 bp, Artificial Sequence
  source: /note="Description of Artificial Sequence: Synthetic polynucleotide"
gataagacccacacctgtcctccatgtcctgctccagaactgctcggcggaccctccgttttcctgtttccacctaagcctaaggacaccctgatgatcagcagaacccctgaagtgacctgtgtggtggtggccgtgtctcacgaagatcccgaagtgaagttcaattggtacgtggacggcgtggaagtgcacaacgccaagaccaagcctagagaggaacagtacaacagcacctacagagtggtgtccgtgctgaccgtgctgcaccaggattggctgaacggcaaagagtacaagtgcaaggtgtccaacaaggccctggccgctcctatcgagaaaaccatctctaaggccaagggccagcctcgggaacctcaggtttacaccctgcctccatgccgggaagagatgaccaagaatcaggtgtccctgtggtgcctggtcaagggcttctacccttccgatatcgccgtggaatgggagagcaatggccagcctgagaacaactacaagaccacacctcctgtgctggacagcgacggctcattcttcctgtacagcaagctgacagtggacaagagcagatggcagcagggcaacgtgttcagctgttctgtgatgcacgaggccctgcacaaccactacacccagaagtctctgtctctgagccccggcaaa

SEQ ID NO: 129 - protein, 605 aa, Artificial Sequence
  source: /note="Description of Artificial Sequence: Synthetic polypeptide"
LDICSKNPCHNGGLCEEISQEVRGDVFPSYTCTCLKGYAGNHCETKGSDKTHTCPPCPAPELLGGPSVFLFPPKPKDTLMISRTPEVTCVVVAVSHEDPEVKFNWYVDGVEVHNAKTKPREEQYNSTYRVVSVLTVLHQDWLNGKEYKCKVSNKALAAPIEKTISKAKGQPREPQVCTLPPSRDELTKNQVSLSCAVKGFYPSDIAVEWESNGQPENNYKTTPPVLDSDGSFFLVSKLTVDKSRWQQGNVFSCSVMHEALHNHYTQKSLSLSPGKGGSGGSGGSGGSCVEPLGMENGNIANSQIAASSVRVTFLGLQHWVPELARLNRAGMVNAWTPSSNDDNPWIQVNLLRRMWVTGVVTQGASRLASHEYLKAFKVAYSLNGHEFDFIHDVNKKHKEFVGNWNKNAVHVNLFETPVEAQYVRLYPTSCHTACTLRFELLGCELNGCANPLGLKNNSIPDKQITASSSYKTWGLHLFSWNPSYARLDKQGNFNAWVAGSYGNDQWLQVDLGSSKEVTGIITQGARNFGSVQFVASYKVAYSNDSANWTEYQDPRTGSSKIFPGNWDNHSHKKNLFETPILARYVRILPVAWHNRIALRLELLGC

SEQ ID NO: 130 - DNA, 1815 bp, Artificial Sequence
  source: /note="Description of Artificial Sequence: Synthetic polynucleotide"
ctggacatctgtagcaagaacccttgccacaacggcggcctgtgcgaagagatttctcaagaagtgcggggcgacgttttccccagctacacctgtacatgtctgaagggctacgccggcaaccactgcgagacaaagggcagcgataagacccacacctgtcctccatgtcctgctccagaactgctcggcggaccctccgttttcctgtttccacctaagcctaaggacaccctgatgatcagcagaacccctgaagtgacctgtgtggtggtggccgtgtctcacgaagatcccgaagtgaagttcaattggtacgtggacggcgtggaagtgcacaacgccaagaccaagcctagagaggaacagtacaacagcacctacagagtggtgtccgtgctgaccgtgctgcaccaggattggctgaacggcaaagagtacaagtgcaaggtgtccaacaaggccctggccgctcctatcgagaaaaccatctctaaggccaagggccagcctcgggaacctcaagtctgtacactgcctcctagccgggacgagctgaccaaaaatcaggtgtccctgagctgcgccgtgaagggcttttacccttccgatatcgccgtggaatgggagagcaatggccagcctgagaacaactacaagaccacacctcctgtgctggacagcgacggctcattctttctggtgtccaagctgacagtggacaagagcagatggcagcagggcaacgtgttcagctgttctgtgatgcacgaggccctgcacaaccactacacccagaagtctctgtctctgagccctggcaaaggcggaagcggtggaagcggaggatctggcggatcttgtgtggaacccctcggcatggaaaacggcaatatcgccaatagccagatcgccgccagcagcgtcagagtgacatttctgggactgcaacactgggtgccagagctggccagactgaatagagccggcatggttaacgcctggacacccagcagcaacgacgacaacccctggattcaagtgaacctgctgcggcgtatgtgggtcacaggtgttgttacacagggcgcaagcagactggccagccacgagtatctgaaggcctttaaggtggcctacagcctgaacggccacgagttcgacttcatccacgacgtgaacaagaagcacaaagagttcgtcggcaactggaacaagaacgccgtgcacgtgaacctgttcgagacacctgtggaagcccagtacgtgcggctgtaccctacaagctgtcacaccgcctgcacactgagattcgagctgctgggctgcgagctgaatggctgtgctaatcctctgggcctgaagaacaatagcatccccgacaagcagatcaccgcctccagcagctataagacatggggcctgcacctgtttagctggaaccctagctacgccagactggacaagcagggaaacttcaatgcctgggtggccggcagctacggcaatgatcaatggctgcaagtggacctgggcagcagcaaagaagtgaccggcatcattacccagggcgctagaaatttcggcagcgtgcagttcgtggccagctacaaagtggcctactccaacgacagcgccaactggaccgagtatcaggaccctagaaccggcagctccaagatcttccccggcaattgggacaaccacagccacaagaagaatctgttcgaaacccctatcctggccagatatgtgcgcattctgcccgtggcctggcacaacagaattgccctgagactggaactgctgggatgc

SEQ ID NO: 131 - protein, 783 aa, Artificial Sequence
  source: /note="Description of Artificial Sequence: Synthetic polypeptide"
LDICSKNPCHNGGLCEEISQEVRGEVFPSYTCTCLKGYAGNHCETKDAHKSEVAHRFKDLGEENFKALVLIAFAQYLQQSPFEDHVKLVNEVTEFAKTCVADESAENCDKSLHTLFGDKLCTVATLRETYGEMADCCAKQEPERNECFLQHKDDNPNLPRLVRPEVDVMCTAFHDNEETFLKKYLYEIARRHPYFYAPELLFFAKRYKAAFTECCQAADKAACLLPKLDELRDEGKASSAKQRLKCASLQKFGERAFKAWAVARLSQRFPKAEFAEVSKLVTDLTKVHTECCHGDLLECADDRADLAKYICENQDSISSKLKECCEKPLLEKSHCIAEVENDEMPADLPSLAADFVESKDVCKNYAEAKDVFLGMFLYEYARRHPDYSVVLLLRLAKTYETTLEKCCAAADPHECYAKVFDEFKPLVEEPQNLIKQNCELFEQLGEYKFQNALLVRYTKKVPQVSTPTLVEVSRNLGKVGSKCCKHPEAKRMPCAEDYLSVVLNQLCVLHEKTPVSDRVTKCCTESLVNRRPCFSALEVDETYVPKEFNAETFTFHADICTLSEKERQIKKQTALVELVKHKPKATKEQLKAVMDDFAAFVEKCCKADDKETCFAEEGKKLVACVEPLGMENGNIANSQIAASSVRVTFLGLQHWVPELARLNRAGMVNAWTPSSNDDNPWIQVNLLRRMWVTGVVTQGASRLASHEYLKAFKVAYSLNGHEFDFIHDVNKKHKEFVGNWNKNAVHVNLFETPVEAQYVRLYPTSCHTACTLRFELLGCELNG

SEQ ID NO: 132 - DNA, 2349 bp, Artificial Sequence
  source: /note="Description of Artificial Sequence: Synthetic polynucleotide"
ctggacatctgtagcaagaacccttgccacaacggcggcctgtgcgaagagatcagtcaagaagtgcggggcgaagtctttcccagctacacctgtacctgtctgaagggctatgccggcaaccactgcgagacaaaggatgcccacaagagcgaggtggcccacagattcaaggatctgggcgaagagaacttcaaggccctggtgctgatcgccttcgctcagtatctccagcagagccctttcgaggaccacgtgaagctggtcaacgaagtgaccgagttcgccaagacctgtgtggccgatgagagcgccgagaactgtgataagagcctgcacaccctgttcggcgacaagctgtgtacagtggccacactgagagaaacctacggcgagatggccgactgctgtgccaagcaagagcccgagagaaacgagtgcttcctccagcacaaggacgacaaccccaacctgcctagactcgtgcgacccgaagtggatgtgatgtgcaccgcctttcacgacaacgaggaaaccttcctgaagaagtacctgtacgagatcgccagacggcacccctacttttatgcccctgagctgctgttcttcgccaagcggtataaggccgccttcaccgaatgttgccaggccgctgataaggctgcctgtctgctgcctaagctggacgagctgagagatgagggcaaagccagctctgccaagcagagactgaaatgcgccagcctccagaagttcggcgagagagcttttaaggcctgggccgttgccagactgagccagagatttcctaaggccgagtttgccgaggtgtccaagctcgtgaccgatctgacaaaggtgcacaccgagtgctgtcacggcgatctgctggaatgtgccgacgatagagccgacctggccaagtacatctgcgagaaccaggacagcatcagcagcaagctgaaagagtgctgcgagaagcccctgctggaaaagtctcactgtatcgccgaggtggaaaacgacgagatgcctgccgatctgcctagcctggctgccgatttcgtggaaagcaaggacgtgtgcaagaactacgccgaggccaaggatgtgtttctgggcatgtttctgtatgagtacgcccgcagacaccccgactattctgtggttctgctgctgcggctggccaaaacctacgagacaaccctggaaaaatgctgcgccgctgccgatcctcacgagtgttatgccaaggtgttcgacgagttcaagcctctggtggaagaaccccagaacctgatcaagcagaactgcgagctgttcgagcagctgggcgagtacaagttccagaatgccctgctcgtgcggtacaccaagaaagtgcctcaggtgtccacacctacactggttgaggtgtcccggaatctgggcaaagtgggcagcaagtgttgcaagcaccctgaggccaagagaatgccttgcgccgaggattatctgagcgtggtgctgaatcagctgtgcgtgctgcacgagaaaacccctgtgtccgacagagtgaccaagtgctgtaccgagagcctcgtgaacagaaggccttgctttagcgccctggaagtggacgagacatacgtgcccaaagagttcaacgccgagacattcaccttccacgccgacatctgcaccctgtccgagaaagagcggcagatcaagaagcagacagccctggtcgagctggttaagcacaagcccaaggccaccaaagaacagctgaaggccgtgatggacgacttcgccgcctttgtcgagaagtgctgcaaggccgacgacaaagagacatgcttcgccgaagagggcaagaaactggtggcctgtgtggaacccctcggcatggaaaacggcaatatcgccaatagccagattgccgccagcagcgtcagagtgacatttctgggactgcaacactgggtgcccgagctggctagactgaatagagccggcatggtcaacgcctggacacccagcagcaacgacgataatccctggattcaagtgaacctgctgcggcgtatgtgggtcacaggtgttgttacacagggcgcaagcagactggccagccacgagtatctgaaggcctttaaggtggcctacagcctgaacggccacgagttcgacttcatccacgacgtgaacaagaagcacaaagagtttgtcggcaactggaacaagaacgccgtgcacgtgaacctgttcgagacacctgtggaagcccagtacgtgcggctgtaccctacaagctgtcacaccgcctgcactctgagattcgaactgctgggatgcgagctgaacggc

SEQ ID NO: 133 - protein, 872 aa, Artificial Sequence; identical to SEQ ID NO: 71
  source: /note="Description of Artificial Sequence: Synthetic polypeptide"

SEQ ID NO: 134 - DNA, 2616 bp, Artificial Sequence
  source: /note="Description of Artificial Sequence: Synthetic polynucleotide"
gacatctgcgaccccaatccttgcgagaatggcggcatttgtctgcctggactggccgatggcagcttctcttgtgaatgccccgatggcttcacagaccccaattgcagctctgtggtggaagtggccagcgacgaggaagaacctacaagcgctggcccctgcacacccaatccatgtcataatggcggaacctgcgagatcagcgaggcctacagaggcgataccttcatcggctacgtgtgcaagtgccccagaggcttcaatggcatccactgccagcacaacatcaacgagtgcgaggtggaaccatgcaagaacggcggcatctgtaccgacctggtggccaattactcttgcgagtgccctggcgagttcatgggcagaaactgccagtacaaggacgcccacaagagcgaggtggcccacagattcaaggacctgggcgaagagaacttcaaggccctggtgctgatcgccttcgctcagtatctccagcagagccctttcgaggaccacgtgaagctggtcaacgaagtgaccgagttcgccaagacctgtgtggccgatgagagcgccgagaactgtgacaagagcctgcacacactgttcggcgacaagctgtgtaccgtggccacactgagagaaacctacggcgagatggccgactgctgtgccaagcaagagcccgagagaaacgagtgcttcctccagcacaaggatgacaaccccaacctgcctagactcgtgcggcctgaagtggatgtgatgtgcaccgcctttcacgacaacgaggaaaccttcctgaagaagtacctgtacgagatcgccagacggcacccctacttttatgcccctgagctgctgttcttcgccaagcggtataaggccgccttcaccgaatgttgccaggccgctgataaggctgcctgtctgctgcctaagctggacgagctgagagatgagggcaaagccagctctgccaagcagagactgaaatgcgccagcctccagaagttcggcgagagagcttttaaggcctgggccgttgccagactgagccagagatttcctaaggccgagtttgccgaggtgtccaagctcgtgaccgatctgacaaaggtgcacaccgagtgctgtcacggcgatctgctggaatgtgccgacgatagagccgacctggccaagtatatctgcgagaaccaggacagcatcagcagcaagctgaaagagtgctgcgagaagcccctgctggaaaagtctcactgtatcgccgaagtggaaaacgacgagatgcccgccgatctgccttctctggctgccgatttcgtggaaagcaaggatgtgtgcaagaactacgccgaggccaaagatgtgtttctgggcatgtttctgtatgagtacgcccgcagacaccccgactattctgtggttctgctgctgcggctggccaagacatacgagacaaccctggaaaaatgctgcgccgctgccgatcctcacgagtgttatgccaaggtgttcgacgagttcaagccactggtggaagaaccccagaacctgatcaagcagaactgcgagctgttcgagcagctgggcgagtacaagttccagaatgccctgctcgtgcggtacaccaagaaagtgcctcaggtgtccacacctacactggttgaggtgtcccggaatctgggcaaagtgggcagcaagtgttgcaagcaccctgaggccaagagaatgccttgcgccgaggattacctgagcgtggtgctgaatcagctgtgcgtgctgcacgagaaaacccctgtgtccgacagagtgaccaagtgctgtaccgagagcctcgtgaacagaaggccttgctttagcgccctggaagtggacgagacatacgtgcccaaagagttcaacgccgagacattcaccttccacgccgatatctgcaccctgtccgagaaagagcggcagatcaagaagcagacagccctggtcgagctggttaagcacaagcccaaggccaccaaagaacagctgaaggccgtgatggacgacttcgccgcctttgtcgagaagtgctgcaaggccgacgacaaagagacatgcttcgccgaagagggcaagaaactggtggcctgttctggccctctgggcatcgaaggcggcatcatcagcaatcagcagatcaccgccagcagcacccacagagcactgtttggcctgcaaaagtggtatccctactacgcccggctgaacaagaagggcctgattaacgcctggacagccgccgagaatgacagatggccctggattcagatcaacctccagcggaagatgagagtgaccggcgttatcacacagggcgcaaagagaatcggctcccctgagtacatcaagagctacaagatcgcctacagcaacgacggcaagacctgggccatgtacaaagtgaagggcaccaacgaggacatggtgttccggggcaacatcgacaacaacaccccttacgccaacagcttcacccctcctatcaaggcccagtacgtgcggctgtaccctcaagtgtgcagaaggcactgtaccctgagaatggaactgctgggctgcgaactgtctggc

SEQ ID NO: 135 - protein, 869 aa, Artificial Sequence
  source: /note="Description of Artificial Sequence: Synthetic polypeptide"
DICDPNPCENGGICLPGLADGSFSCECPDGFTDPNCSSVVEVASDEEEPTSAGPCTPNPCHNGGTCEISEAYRGDTFIGYVCKCPRGFNGIHCQHNINECEVEPCKNGGICTDLVANYSCECPGEFMGRNCQYKDAHKSEVAHRFKDLGEENFKALVLIAFAQYLQQSPFEDHVKLVNEVTEFAKTCVADESAENCDKSLHTLFGDKLCTVATLRETYGEMADCCAKQEPERNECFLQHKDDNPNLPRLVRPEVDVMCTAFHDNEETFLKKYLYEIARRHPYFYAPELLFFAKRYKAAFTECCQAADKAACLLPKLDELRDEGKASSAKQRLKCASLQKFGERAFKAWAVARLSQRFPKAEFAEVSKLVTDLTKVHTECCHGDLLECADDRADLAKYICENQDSISSKLKECCEKPLLEKSHCIAEVENDEMPADLPSLAADFVESKDVCKNYAEAKDVFLGMFLYEYARRHPDYSVVLLLRLAKTYETTLEKCCAAADPHECYAKVFDEFKPLVEEPQNLIKQNCELFEQLGEYKFQNALLVRYTKKVPQVSTPTLVEVSRNLGKVGSKCCKHPEAKRMPCAEDYLSVVLNQLCVLHEKTPVSDRVTKCCTESLVNRRPCFSALEVDETYVPKEFNAETFTFHADICTLSEKERQIKKQTALVELVKHKPKATKEQLKAVMDDFAAFVEKCCKADDKETCFAEEGKKLVACSEPLGMKSGHIQDYQITASSIFRTLNMDMFTWEPRKARLDKQGKVNAWTSGHNDQSQWLQVDLLVPTKVTGIITQGAKDFGHVQFVGSYKLAYSNDGEHWTVYQDEKQRKDKVFQGNFDNDTHRKNVIDPPIYARHIRILPWSWYGRITLRSELLGC

SEQ ID NO: 136 - DNA, 2607 bp, Artificial Sequence
  source: /note="Description of Artificial Sequence: Synthetic polynucleotide"
gacatctgcgaccccaatccttgcgagaatggcggcatttgtctgcctggactggccgatggcagcttctcttgtgaatgccccgatggcttcacagaccccaattgcagctctgtggtggaagtggccagcgacgaggaagaacctacaagcgctggcccctgcacacccaatccatgtcataatggcggaacctgcgagatcagcgaggcctacagaggcgataccttcatcggctacgtgtgcaagtgccccagaggcttcaatggcatccactgccagcacaacatcaacgagtgcgaggtggaaccatgcaagaacggcggcatctgtaccgacctggtggccaattactcttgcgagtgccctggcgagttcatgggcagaaactgccagtacaaggacgcccacaagagcgaggtggcccacagattcaaggacctgggcgaagagaacttcaaggccctggtgctgatcgccttcgctcagtatctccagcagagccctttcgaggaccacgtgaagctggtcaacgaagtgaccgagttcgccaagacctgtgtggccgatgagagcgccgagaactgtgacaagagcctgcacacactgttcggcgacaagctgtgtaccgtggccacactgagagaaacctacggcgagatggccgactgctgtgccaagcaagagcccgagagaaacgagtgcttcctccagcacaaggatgacaaccccaacctgcctagactcgtgcggcctgaagtggatgtgatgtgcaccgcctttcacgacaacgaggaaaccttcctgaagaagtacctgtacgagatcgccagacggcacccctacttttatgcccctgagctgctgttcttcgccaagcggtataaggccgccttcaccgaatgttgccaggccgctgataaggctgcctgtctgctgcctaagctggacgagctgagagatgagggcaaagccagctctgccaagcagagactgaaatgcgccagcctccagaagttcggcgagagagcttttaaggcctgggccgttgccagactgagccagagatttcctaaggccgagtttgccgaggtgtccaagctcgtgaccgatctgacaaaggtgcacaccgagtgctgtcacggcgatctgctggaatgtgccgacgatagagccgacctggccaagtatatctgcgagaaccaggacagcatcagcagcaagctgaaagagtgctgcgagaagcccctgctggaaaagtctcactgtatcgccgaagtggaaaacgacgagatgcccgccgatctgccttctctggctgccgatttcgtggaaagcaaggatgtgtgcaagaactacgccgaggccaaagatgtgtttctgggcatgtttctgtatgagtacgcccgcagacaccccgactattctgtggttctgctgctgcggctggccaagacatacgagacaaccctggaaaaatgctgcgccgctgccgatcctcacgagtgttatgccaaggtgttcgacgagttcaagccactggtggaagaaccccagaacctgatcaagcagaactgcgagctgttcgagcagctgggcgagtacaagttccagaatgccctgctcgtgcggtacaccaagaaagtgcctcaggtgtccacacctacactggttgaggtgtcccggaatctgggcaaagtgggcagcaagtgttgcaagcaccctgaggccaagagaatgccttgcgccgaggattacctgagcgtggtgctgaatcagctgtgcgtgctgcacgagaaaacccctgtgtccgacagagtgaccaagtgctgtaccgagagcctcgtgaacagaaggccttgctttagcgccctggaagtggacgagacatacgtgcccaaagagttcaacgccgagacattcaccttccacgccgatatctgcaccctgtccgagaaagagcggcagatcaagaagcagacagccctggtcgagctggttaagcacaagcccaaggccaccaaagaacagctgaaggccgtgatggacgacttcgccgcctttgtcgagaagtgctgcaaggccgacgacaaagagacatgcttcgccgaagagggcaagaaactggtggcctgttctgagccactgggcatgaagtctggccacatccaggattaccagatcaccgccagcagcatcttcagaaccctgaacatggatatgttcacctgggagccccggaaggccagactggataagcagggaaaagtgaacgcctggaccagcggccacaatgaccagtctcagtggctgcaagtggacctgctggtgcctaccaaagtgaccggcatcatcacacagggcgcaaaggatttcggccacgtgcagtttgtgggcagctacaagctggcctacagcaacgatggcgagcactggacagtgtaccaggacgagaagcagcggaaggataaggtgttccagggcaacttcgacaacgacacccaccggaagaacgtgatcgaccctcctatctacgcccggcacatcagaatcctgccttggtcttggtacggccggatcaccctgagaagcgagctgcttggatgt

SEQ ID NO: 137 - protein, 781 aa, Artificial Sequence
  source: /note="Description of Artificial Sequence: Synthetic polypeptide"
LDICSKNPCHNGGLCEEISQEVRGDVFPSYTCTCLKGYAGNHCETKDAHKSEVAHRFKDLGEENFKALVLIAFAQYLQQSPFEDHVKLVNEVTEFAKTCVADESAENCDKSLHTLFGDKLCTVATLRETYGEMADCCAKQEPERNECFLQHKDDNPNLPRLVRPEVDVMCTAFHDNEETFLKKYLYEIARRHPYFYAPELLFFAKRYKAAFTECCQAADKAACLLPKLDELRDEGKASSAKQRLKCASLQKFGERAFKAWAVARLSQRFPKAEFAEVSKLVTDLTKVHTECCHGDLLECADDRADLAKYICENQDSISSKLKECCEKPLLEKSHCIAEVENDEMPADLPSLAADFVESKDVCKNYAEAKDVFLGMFLYEYARRHPDYSVVLLLRLAKTYETTLEKCCAAADPHECYAKVFDEFKPLVEEPQNLIKQNCELFEQLGEYKFQNALLVRYTKKVPQVSTPTLVEVSRNLGKVGSKCCKHPEAKRMPCAEDYLSVVLNQLCVLHEKTPVSDRVTKCCTESLVNRRPCFSALEVDETYVPKEFNAETFTFHADICTLSEKERQIKKQTALVELVKHKPKATKEQLKAVMDDFAAFVEKCCKADDKETCFAEEGKKLVACANPLGLKNNSIPDKQITASSSYKTWGLHLFSWNPSYARLDKQGNFNAWVAGSYGNDQWLQVDLGSSKEVTGIITQGARNFGSVQFVASYKVAYSNDSANWTEYQDPRTGSSKIFPGNWDNHSHKKNLFETPILARYVRILPVAWHNRIALRLELLGC

SEQ ID NO: 138 - DNA, 2343 bp, Artificial Sequence
  source: /note="Description of Artificial Sequence: Synthetic polynucleotide"
ctggacatctgtagcaagaacccttgccacaacggcggcctgtgcgaagagatttctcaagaagtgcggggcgacgttttccccagctacacctgtacatgtctgaagggctacgccggcaaccactgcgagacaaaggatgcccacaagagcgaggtggcccacagattcaaggatctgggcgaagagaacttcaaggccctggtgctgatcgccttcgctcagtatctccagcagagccctttcgaggaccacgtgaagctggtcaacgaagtgaccgagttcgccaagacctgtgtggccgatgagagcgccgagaactgtgataagagcctgcacaccctgttcggcgacaagctgtgtacagtggccacactgagagaaacctacggcgagatggccgactgctgtgccaagcaagagcccgagagaaacgagtgcttcctccagcacaaggacgacaaccccaacctgcctagactcgtgcgacccgaagtggatgtgatgtgcaccgcctttcacgacaacgaggaaaccttcctgaagaagtacctgtacgagatcgccagacggcacccctacttttatgcccctgagctgctgttcttcgccaagcggtataaggccgccttcaccgaatgttgccaggccgctgataaggctgcctgtctgctgcctaagctggacgagctgagagatgagggcaaagccagctctgccaagcagagactgaaatgcgccagcctccagaagttcggcgagagagcttttaaggcctgggccgttgccagactgagccagagatttcctaaggccgagtttgccgaggtgtccaagctcgtgaccgatctgacaaaggtgcacaccgagtgctgtcacggcgatctgctggaatgtgccgacgatagagccgacctggccaagtacatctgcgagaaccaggacagcatcagcagcaagctgaaagagtgctgcgagaagcccctgctggaaaagtctcactgtatcgccgaggtggaaaacgacgagatgcctgccgatctgcctagcctggctgccgatttcgtggaaagcaaggacgtgtgcaagaactacgccgaggccaaggatgtgtttctgggcatgtttctgtatgagtacgcccgcagacaccccgactattctgtggttctgctgctgcggctggccaaaacctacgagacaaccctggaaaaatgctgcgccgctgccgatcctcacgagtgttatgccaaggtgttcgacgagttcaagcctctggtggaagaaccccagaacctgatcaagcagaactgcgagctgttcgagcagctgggcgagtacaagttccagaatgccctgctcgtgcggtacaccaagaaagtgcctcaggtgtccacacctacactggttgaggtgtcccggaatctgggcaaagtgggcagcaagtgttgcaagcaccctgaggccaagagaatgccttgcgccgaggattacctgagcgtggtgctgaatcagctgtgcgtgctgcacgagaaaacccctgtgtccgacagagtgaccaagtgctgtaccgagagcctcgtgaacagaaggccttgctttagcgccctggaagtggacgagacatacgtgcccaaagagttcaacgccgagacattcaccttccacgccgacatctgcaccctgtccgagaaagagcggcagatcaagaagcagacagccctggtcgagctggttaagcacaagcccaaggccaccaaagaacagctgaaggccgtgatggacgacttcgccgcctttgtcgagaagtgctgcaaggccgacgacaaagagacatgcttcgccgaagagggcaagaaactggtggcctgtgctaaccctctgggcctgaagaacaacagcatccccgataagcagatcaccgccagcagcagctataagacatggggcctgcacctgttcagctggaacccttcttacgccagactggacaagcagggcaacttcaatgcttgggtggccggcagctacggcaatgatcagtggctgcaagtggacctgggcagcagcaaagaagtgacaggcatcatcacccagggcgcaagaaatttcggcagcgtgcagttcgtggccagctacaaggtggcctacagcaacgatagcgccaactggaccgagtatcaggaccctagaaccggcagctccaagatcttccccggcaactgggacaaccacagccacaagaagaatctgttcgagacacccatcctggccagatacgtgcggattctgcctgtggcctggcacaacagaatcgccctgagactggaactgctgggctgt

SEQ ID NO: 139 - protein, 623 aa, Artificial Sequence
  source: /note="Description of Artificial Sequence: Synthetic polypeptide"
LDICSKNPCHNGGLCEEISQEVRGDVFPSYTCTCLKGYAGNHCETKDAHKSEVAHRFKDLGEENFKALVLIAFAQYLQQSPFEDHVKLVNEVTEFAKTCVADESAENCDKSLHTLFGDKLCTVATLRETYGEMADCCAKQEPERNECFLQHKDDNPNLPRLVRPEVDVMCTAFHDNEETFLKKYLYEIARRHPYFYAPELLFFAKRYKAAFTECCQAADKAACLLPKLDELRDEGKASSAKQRLKCASLQKFGERAFKAWAVARLSQRFPKAEFAEVSKLVTDLTKVHTECCHGDLLECADDRADLAKYICENQDSISSKLKECCEKPLLEKSHCIAEVENDEMPADLPSLAADFVESKDVCKNYAEAKDVFLGMFLYEYARRHPDYSVVLLLRLAKTYETTLEKCCAAADPHECYAKVFDEFKPLVEEPQNLIKQNCELFEQLGEYKFQNALLVRYTKKVPQVSTPTLVEVSRNLGKVGSKCCKHPEAKRMPCAEDYLSVVLNQLCVLHEKTPVSDRVTKCCTESLVNRRPCFSALEVDETYVPKEFNAETFTFHADICTLSEKERQIKKQTALVELVKHKPKATKEQLKAVMDDFAAFVEKCCKADDKETCFAEEGKKLVA

SEQ ID NO: 140 - DNA, 1869 bp, Artificial Sequence
  source: /note="Description of Artificial Sequence: Synthetic polynucleotide"
ctggacatctgtagcaagaacccttgccacaacggcggcctgtgcgaagagatttctcaagaagtgcggggcgacgttttccccagctacacctgtacatgtctgaagggctacgccggcaaccactgcgagacaaaggatgcccacaagagcgaggtggcccacagattcaaggatctgggcgaagagaacttcaaggccctggtgctgatcgccttcgctcagtatctccagcagagccctttcgaggaccacgtgaagctggtcaacgaagtgaccgagttcgccaagacctgtgtggccgatgagagcgccgagaactgtgataagagcctgcacaccctgttcggcgacaagctgtgtacagtggccacactgagagaaacctacggcgagatggccgactgctgtgccaagcaagagcccgagagaaacgagtgcttcctccagcacaaggacgacaaccccaacctgcctagactcgtgcgacccgaagtggatgtgatgtgcaccgcctttcacgacaacgaggaaaccttcctgaagaagtacctgtacgagatcgccagacggcacccctacttttatgcccctgagctgctgttcttcgccaagcggtataaggccgccttcaccgaatgttgccaggccgctgataaggctgcctgtctgctgcctaagctggacgagctgagagatgagggcaaagccagctctgccaagcagagactgaaatgcgccagcctccagaagttcggcgagagagcttttaaggcctgggccgttgccagactgagccagagatttcctaaggccgagtttgccgaggtgtccaagctcgtgaccgatctgacaaaggtgcacaccgagtgctgtcacggcgatctgctggaatgtgccgacgatagagccgacctggccaagtacatctgcgagaaccaggacagcatcagcagcaagctgaaagagtgctgcgagaagcccctgctggaaaagtctcactgtatcgccgaggtggaaaacgacgagatgcctgccgatctgcctagcctggctgccgatttcgtggaaagcaaggacgtgtgcaagaactacgccgaggccaaggatgtgtttctgggcatgtttctgtatgagtacgcccgcagacaccccgactattctgtggttctgctgctgcggctggccaaaacctacgagacaaccctggaaaaatgctgcgccgctgccgatcctcacgagtgttatgccaaggtgttcgacgagttcaagcctctggtggaagaaccccagaacctgatcaagcagaactgcgagctgttcgagcagctgggcgagtacaagttccagaatgccctgctcgtgcggtacaccaagaaagtgcctcaggtgtccacacctacactggttgaggtgtcccggaatctgggcaaagtgggcagcaagtgttgcaagcaccctgaggccaagagaatgccttgcgccgaggattacctgagcgtggtgctgaatcagctgtgcgtgctgcacgagaaaacccctgtgtccgacagagtgaccaagtgctgtaccgagagcctcgtgaacagaaggccttgctttagcgccctggaagtggacgagacatacgtgcccaaagagttcaacgccgagacattcaccttccacgccgacatctgcaccctgtccgagaaagagcggcagatcaagaagcagacagccctggtcgagctggttaagcacaagcccaaggccaccaaagaacagctgaaggccgtgatggacgacttcgccgcctttgtcgagaagtgctgcaaggccgacgacaaagagacatgcttcgccgaagagggcaagaaactggtggct

SEQ ID NO: 141 - protein, 160 aa, Artificial Sequence
  source: /note="Description of Artificial Sequence: Synthetic polypeptide"
CVEPLGLENGNIANSQIAASSVRVTFLGLQHWVPELARLNRAGMVNAWTPSSNDDNPWIQVNLLRRMWVTGVVTQGASRLASHEYLKAFKVAYSLNGHEFDFIHDVNKKHKEFVGNWNKNAVHVNLFETPVEAQYVRLYPTSCHTACTLRFELLGCELNG

SEQ ID NO: 142 - protein, 160 aa, Artificial Sequence
  source: /note="Description of Artificial Sequence: Synthetic polypeptide"
CVEPLGMENGNIANSQIAASSVRVTFLGLQHWVPELARLNRAGMVNAWTPSSNDDNPWIQVNLLRRMWVTGVVTQGASRLASHEYLKAFKVAYSLNGHEFDFIHDVNKKHKEFVGNWNKNAVHVNLFETPVEAQYVRLYPTSCHTACTLRFELLGCELNG

SEQ ID NO: 143 - protein, 158 aa, Artificial Sequence
  source: /note="Description of Artificial Sequence: Synthetic polypeptide"
CANPLGLKNNSIPDKQITASSSYKTWGLHLFSWNPSYARLDKQGNFNAWVAGSYGNDQWLQVDLGSSKEVTGIITQGARNFGSVQFVASYKVAYSNDSANWTEYQDPRTGSSKIFPGNWDNHSHKKNLFETPILARYVRILPVAWHNRIALRLELLGC

SEQ ID NO: 144 - protein, 161 aa, Artificial Sequence
  source: /note="Description of Artificial Sequence: Synthetic polypeptide"
CSGPLGIEGGIISNQQITASSTHRALFGLQKWYPYYARLNKKGLINAWTAAENDRWPWIQINLQRKMRVTGVITQGAKRIGSPEYIKSYKIAYSNDGKTWAMYKVKGTNEDMVFRGNIDNNTPYANSFTPPIKAQYVRLYPQVCRRHCTLRMELLGCELSG

SEQ ID NO: 145 - protein, 162 aa, Artificial Sequence
  source: /note="Description of Artificial Sequence: Synthetic polypeptide"
CSEPLGMKSGHIQDYQITASSIFRTLNMDMFTWEPRKARLDKQGKVNAWTSGHNDQSQWLQVDLLVPTKVTGIITQGAKDFGHVQFVGSYKLAYSNDGEHWTVYQDEKQRKDKVFQGNFDNDTHRKNVIDPPIYARHIRILPWSWYGRITLRSELLGCTEEE

SEQ ID NO: 146 - protein, 158 aa, Artificial Sequence
  source: /note="Description of Artificial Sequence: Synthetic polypeptide"
CSEPLGMKSGHIQDYQITASSIFRTLNMDMFTWEPRKARLDKQGKVNAWTSGHNDQSQWLQVDLLVPTKVTGIITQGAKDFGHVQFVGSYKLAYSNDGEHWTVYQDEKQRKDKVFQGNFDNDTHRKNVIDPPIYARHIRILPWSWYGRITLRSELLGC

SEQ ID NO: 147 - protein, 805 aa, Artificial Sequence; identical to SEQ ID NO: 117
  source: /note="Description of Artificial Sequence: Synthetic polypeptide"

SEQ ID NO: 148 - DNA, 2415 bp, Artificial Sequence; identical to SEQ ID NO: 118
  source: /note="Description of Artificial Sequence: Synthetic polynucleotide"

1. A therapeutic multidomain fusion protein comprising a solubilizing domain, wherein the solubilizing domain is located between the domains of the multidomain fusion protein.

2. A therapeutic multidomain fusion protein of formula A-S-B (Formula I), wherein
(i) A is a first domain, or a first set of domains
(ii) S is a solubilizing domain, and
(iii) C is a second domain, or a second set of domains.

3. The multidomain fusion protein of claim 1 or 2, wherein the solubilizing domain comprises albumin, e.g. human serum albumin (HSA), or a functional variant thereof.

4. The multidomain fusion protein of claim 3, wherein the solubilizing domain is human serum albumin, or a functional variant thereof.

5. The multidomain fusion protein of claim 4, wherein the solubilizing domain is HSA D3.

6. The multidomain fusion protein of any one of the preceding claims, wherein the solubilizing domain is HSA and has an amino acid sequence of SEQ ID NO: 4, or at least 90% sequence identity thereto.

7. The multidomain fusion protein of any one of the preceding claims, wherein the solubilizing domain is linked directly to the first domain, to the second domain or to both domains.

8. The multidomain fusion protein of any one of the preceding claims, wherein the solubilizing domain is linked indirectly to the first domain and/or the second domain by a linker.

9. A method for the manufacturing of a therapeutic multidomain protein by (i) engineering one or more domains of the multidomain protein to have the desired therapeutic characteristics, and (ii) inserting albumin, e.g. HSA or functional variants thereof, within the domains of the therapeutic protein.

10. The method of claim 9, wherein the solubilizing domain is HSA and has an amino acid sequence of SEQ ID NO: 4, or at least 90% sequence identity thereto.

11. The method of any one of the claim 9 or 10, wherein the solubilizing domain is linked directly to the first domain, to the second domain or to both domains.

12. The method of any one of the claim 9 or 10, wherein the solubilizing domain is linked indirectly to the first domain and/or the second domain by a linker.

13. The method of claim 9, wherein the therapeutic multidomain protein is the therapeutic multidomain protein according to any one of the claims 1 to 8.

14. The multidomain fusion protein of any one of claims 1 to 8 for use as a medicament.

15. A use of the multidomain fusion protein obtained by the method of claims 9 to 13, for the manufacture of a medicament.
